(19) United States
(12) Patent Application Publication
(10) Pub. No.: US 2012/0108651 A1
(43) Pub. Date: May 3, 2012

(54) GENETIC POLYMORPHISMS ASSOCIATED WITH VENOUS THROMBOSIS AND STATIN RESPONSE, METHODS OF DETECTION AND USES THEREOF

(75) Inventors: Lance BARE, Walnut Creek, CA (US); James J. DEVLIN, Lafayette, CA (US); Frits R. ROSENDAAL, KC Wasenaar (NL); Pieter H. REITSMA, TJ Leiden (NL); Irene D. BEZEMER, Ultrecht (NL)

(73) Assignees: Leiden University Medical Center (LUMC) Acting On Behalf of Academic Hospital Leiden (AZL), Leiden (NL); CELERA CORPORATION, Alameda, CA (US)

(21) Appl. No.: 13/286,934

(22) Filed: Nov. 1, 2011

Related U.S. Application Data
(60) Provisional application No. 61/409,434, filed on Nov. 2, 2010.

(51) Int. Cl. C12Q 1/68; A61K 31/5377; A61K 31/4439; A61K 31/366; C07H 21/04; A61K 31/397; A61K 31/455; A61K 31/4422; A61P 7/02; A61K 31/4545; A61K 31/7088

(52) U.S. Cl. 514/44 A; 435/6.11; 514/303; 514/230.8; 514/338; 514/456; 514/210.02; 514/355; 514/460; 536/24.33; 536/24.31

(57) ABSTRACT

The present invention provides compositions and methods based on genetic polymorphisms that are associated with response to statin treatment (particularly for reducing the risk of venous thrombosis). For example, the present invention relates to nucleic acid molecules containing the polymorphisms, variant proteins encoded by these nucleic acid molecules, reagents for detecting the polymorphic nucleic acid molecules and variant proteins, and methods of using the nucleic acid molecules and proteins as well as methods of using reagents for their detection.

### CROSS-REFERENCE TO RELATED APPLICATIONS

[0001] This application is a non-provisional application of U.S. provisional application Ser. No. 61/409,434, filed Nov. 2, 2010, the contents of which is hereby incorporated by reference in its entirety into this application.

### FIELD OF THE INVENTION

[0002] The present invention is in the field of disease risk and drug response, particularly genetic polymorphisms that are associated with risk for developing venous thrombosis (VT) and/or response to statins, especially statin treatment for the prevention or treatment of VT and related pathologies. In particular, the present invention relates to specific single nucleotide polymorphisms (SNPs) in the human genome, and their association with risk for developing VT and/or variability in responsiveness to statin treatment (including preventive treatment) in reducing VT risk between different individuals. The SNPs disclosed herein can be used, for example, as targets for diagnostic reagents and for the development of therapeutic agents. In particular, the SNPs of the present invention are useful for such uses as predicting an individual's response to therapeutic agents such as evaluating the likelihood of an individual differentially responding positively to statins, particularly for the treatment or prevention of VT (including recurrent VT), identifying an individual who has an increased or decreased risk of developing VT (including recurrent VT), for early detection of VT, for providing clinically important information for the prevention and/or treatment of VT, for predicting recurrence of VT, and for screening and selecting therapeutic agents. Methods, assays, kits, and reagents for detecting the presence of these polymorphisms and their encoded products are provided.

### BACKGROUND OF THE INVENTION

[0003] The present invention relates to SNPs that are associated with risk for developing venous thrombosis (VT) and/or variability between individuals in their response to statins, particularly for reducing the risk of VT.

[0004] VT, which may also be referred to as venous thromboembolism (VTE), includes deep vein thrombosis (DVT) and pulmonary embolism (PE). VT can further include a first occurrence of VT (i.e., primary VT) or recurrent VT.

[0005] Venous Thrombosis (VT)

[0006] The development of a blood clot is known as thrombosis. Venous thrombosis (VT) is the formation of a blood clot in the veins. VT may also be referred to as venous thromboembolism (VTE). Over 200,000 new cases of VT occur annually. Of these, 30 percent of patients die within three days; one in five suffer sudden death due to pulmonary embolism (PE) (Seminars in Thrombosis and Hemostasis, 2002, Vol. 28, Suppl. 2) (Stein et al., Chest 2002; 122(3):960-962, further describes PE). Caucasians and African-Americans have a significantly higher incidence than Hispanics, Asians or Pacific Islanders (White, Circulation 107(23 Suppl 0:14-8 Review, 2003).

[0007] Several conditions can lead to an increased tendency to develop blood clots in the veins or arteries (National Hemophilia Foundation, HemAware newsletter, Vol. 6 (5), 2001), and such conditions may be inherited (genetic) or acquired. Examples of acquired conditions are surgery and trauma, prolonged immobilization, cancer, myeloproliferative disorders, age, hormone therapy, and even pregnancy, all of which may result in thrombosis (Seligsohn et al., New Eng J Med 344(16):1222-1231, 2001 and Heit et al., Thromb Haemost 2001; 86(1):452-463). Family and twin studies indicate that inherited (genetic) causes account for about 60% of the risk for deep vein thrombosis (DVT) (Souto et al., Am J Hum Genet. 2000; 67(6):1452-1459; Larsen et al., Epidemiology 2003; 14(3):328-332). Inherited causes include polymorphisms in any of several different clotting, anticoagulant, or thrombolytic factors, such as the factor V gene (the factor V Leiden (FVL) variant), prothrombin gene (factor II), and methylenetetrahydrofolate reductase gene (MTHFR). Other likely inherited causes are an increase in the expression levels of the factors VIII, IX or XI, or fibrinogen genes (Seligsohn et al., New Eng J Med 344(16):1222-1231, 2001). Deficiencies of natural anticoagulants antithrombin, protein C and protein S are strong risk factors for DVT; however, the variants causing these deficiencies are rare, and explain only about 1% of all DVTs (Rosendaal et al., Lancet 1999; 353(9159):1167-1173). The factor V Leiden (FVL) and prothrombin G20210A genetic variants have been consistently found to be associated with DVT (Bertina et al., Nature 1994; 369(6475):64-67 and Poort et al., Blood 1996; 88(10):3698-3703) but still only explain a fraction of the DVT events (Rosendaal, Lancet 1999; 353(9159):1167-1173; Bertina et al., Nature 1994; 369(6475):64-67; Poort et al., Blood 1996; 88(10):3698-3703). Elevated plasma concentrations of coagulation factors (e.g., VIII, IX, X, and XI) have also been shown to be important risk factors for DVT (Kyrle et al., N Engl J. Med. 2000; 343:457-462; van Hylckama Vlieg et al., Blood. 2000; 95:3678-3682; de Visser et al., Thromb Haemost. 2001; 85:1011-1017; and Meijers et al., N Engl J. Med. 2000; 342:696-701, respectively).

[0008] About one-third of patients with symptomatic VT manifest pulmonary embolism (PE), whereas two-thirds manifest deep vein thrombosis (DVT) (White, Circulation 107(23 Suppl 0:14-8 Review, 2003). DVT is an acute VT in a deep vein, usually in the thigh, legs, or pelvis, and it is a serious and potentially fatal disorder that can arise as a complication for hospital patients, but may also affect otherwise healthy people (Lensing et al., Lancet 353:479-485, 1999). Large blood clots in VT may interfere with blood circulation and impede normal blood flow. In some instances, blood clots may break off and travel to distant major organs such as the brain, heart or lungs as in PE and result in fatality. There is evidence to suggest that patients with a first episode of VT be treated with anticoagulant agents (Kearon et al., New Engl J Med 340:901-907, 1999).

[0009] VT is a chronic disease with episodic recurrence; about 30% of patients develop recurrence within 10 years after a first occurrence of VT (Heit et al., Arch Intern Med. 2000; 160: 761-768; Heit et al., Thromb Haemost 2001; 86(1):452-463; and Schulman et al., J Thromb Haemost. 2006; 4: 732-742). Recurrence of VT may be referred to herein as recurrent VT. The hazard of recurrence varies with the time since the incident event and is highest within the first 6 to 12 months. Although anticoagulation is effective in preventing recurrence, the duration of anticoagulation does not affect the risk of recurrence once primary therapy for the incident event is stopped (Schulman et al., J Thromb Haemost. 2006; 4: 732-742 and van Dongen et al., Arch Intern Med. 2003; 163: 1285-1293). Independent predictors of recurrence include male gender (McRae et al., Lancet. 2006; 368: 371-378), increasing patient age and body mass index, neurological disease with leg paresis, and active cancer (Cushman et al., Am J. Med. 2004; 117: 19-25; Heit et al., Arch Intern Med. 2000; 160: 761-768; Schulman et al., J Thromb Haemost. 2006; 4: 732-742; and Baglin et al., Lancet. 2003; 362: 523-526). Additional predictors include “idiopathic” venous thrombosis (Baglin et al., Lancet. 2003; 362: 523-526), a lupus anticoagulant or antiphospholipid antibody (Kearon et al., N Engl J Med. 1999; 340: 901-907 and Schulman et al., Am J. Med. 1998; 104: 332-338), antithrombin, protein C or protein S deficiency (van den Belt et al., Arch Intern Med. 1997; 157: 227-232), and possibly persistently increased plasma fibrin D-dimer (Palareti et al., N Engl J. Med. 2006; 355: 1780-1789) and residual venous thrombosis (Prandoni et al., Ann Intern Med. 2002; 137: 955-960).

[0010] VT and cancer can be coincident. According to clinical data prospectively collected on the population of Olmsted County, Minn., since 1966, the annual incidence of a first episode of DVT or PE in the general population is 117 of 100,000. Cancer alone was associated with a 4.1-fold risk of thrombosis, whereas chemotherapy increased the risk 6.5-fold. Combining these estimates yields an approximate annual incidence of VT in cancer patients of 1 in 200 cancer patients (Lee et al., Circulation. 2003; 107:I-17-1-21). Extrinsic factors such as surgery, hormonal therapy, chemotherapy, and long-term use of central venous catheters increase the cancer-associated prethrombotic state. Post-operative thrombosis occurs more frequently in patients with cancer as compared to non-neoplastic patients (Rarh et al., Blood coagulation and fibrinolysis 1992; 3:451).

[0011] Thus, there is a need for novel genetic markers that are predictive of predisposition to VT (as well as response to statin treatment for preventing VT), particularly for individuals who are unrecognized as having a predisposition to developing the disease based on conventional risk factors, as well as genetic markers that are predictive of recurrent VT in individuals who have already experienced a VT event. Such genetic markers may enable screening of VT in much larger populations compared with the populations that can currently be evaluated by using existing risk factors and biomarkers. The availability of a genetic test may allow, for example, appropriate preventive treatments for acute venous thrombotic events to be provided for high risk individuals (such preventive treatments may include, for example, statins as well as anticoagulant agents). Moreover, the discovery of genetic markers associated with VT may provide novel targets for therapeutic intervention or preventive treatments.

[0012] HMG-CoA Reductase Inhibitors (Statins)

[0013] HMG-CoA reductase inhibitors (statins) can be used for the prevention and treatment of VT, in addition to their use for the prevention and treatment of other cardiovascular diseases (CVD), particularly coronary heart disease (CHD) (including coronary events, such as myocardial infarction (MI), and cerebrovascular events, such as stroke and transient ischemic attack (TIA)). Reduction of MI, stroke, and other coronary and cerebrovascular events and total mortality by treatment with HMG-CoA reductase inhibitors has been demonstrated in a number of randomized, double-blinded, placebo-controlled prospective trials (D. D. Waters, Clin Cardiol 24(8 Suppl): III3-7 (2001); B. K. Singh and J. L. Mehta, Curr Opin Cardiol 17(5):503-11 (2002)). These drugs are thought to typically have their primary effect through the inhibition of hepatic cholesterol synthesis, thereby upregulating LDL receptors in the liver. The resultant increase in LDL catabolism results in decreased circulating LDL, a major risk factor for cardiovascular disease.

[0014] Examples of statins include, but are not limited to, atorvastatin (Lipitor®), rosuvastatin (Crestor®), pravastatin (Pravachol®), simvastatin (Zocor®), fluvastatin (Lescol®), and lovastatin (Mevacor®), as well as combination therapies that include a statin such as simvastatin+ezetimibe (Vytorin®), lovastatin+niacin (Advicor®), atorvastatin+amlodipine besylate (Caduet®), and simvastatin+niacin (Simcor®).

[0015] Statins can be divided into two types according to their physicochemical and pharmacokinetic properties. Statins such as atorvastatin, simvastatin, lovastatin, and cerivastatin are lipophilic in nature and, as such, diffuse across membranes and thus are highly cell permeable. Hydrophilic statins such as pravastatin are more polar, such that they require specific cell surface transporters for cellular uptake. K. Ziegler and W. Stunkel, Biochim Biophys Acta 1139(3):203-9 (1992); M. Yamazaki et al., Am J Physiol 264(1 Pt 1):G36-44 (1993); T. Komai et al., Biochem Pharmacol 43(4):667-70 (1992). The latter statins utilizes a transporter, OATP2, whose tissue distribution is confined to the liver and, therefore, they are relatively hepato-specific inhibitors. B. Hsiang et al., J Biol Chem 274(52):37161-37168 (1999). The former statins, not requiring specific transport mechanisms, are available to all cells and they can directly impact a much broader spectrum of cells and tissues. These differences in properties may influence the spectrum of activities that each statin possesses. Pravastatin, for instance, has a low myopathic potential in animal models and myocyte cultures compared to lipophilic statins. B. A. Masters et al., Toxicol Appl Pharmacol 131(1):163-174 (1995); K. Nakahara et al., Toxicol Appl Pharmacol 152(1):99-106 (1998); J. C. Reijneveld et al., Pediatr Res 39(6):1028-1035 (1996). Statins are reviewed in Vaughan et al., “Update on Statins: 2003”, Circulation 2004; 110; 886-892.

[0016] Evidence from gene association studies is accumulating to indicate that responses to drugs are, indeed, at least partly under genetic control. As such, pharmacogenetics—the study of variability in drug responses attributed to hereditary factors in different populations—may significantly assist in providing answers toward meeting this challenge. A. D. Roses, Nature 405(6788):857-865 (2000); V. Mooser et al., J Thromb Haemost 1(7):1398-1402 (2003); L. M. Humma and S. G. Terra, Am J Health Syst Pharm 59(13):1241-1252 (2002). Associations have been reported between specific genotypes, as defined by SNPs and other genetic sequence variations, and specific responses to cardiovascular drugs. For example, a polymorphism in the KIF6 gene is associated with response to statin treatment (Iakoubova et al., “Polymorphism in KIF6 gene and benefit from statins after acute coronary syndromes: results from the PROVE IT-TIMI 22 study”, J Am Coll Cardiol. 2008 Jan. 29; 51(4):449-55; Iakoubova et al., “Association of the 719Arg variant of KIF6 with both increased risk of coronary events and with greater response to statin therapy”, J Am Coll Cardiol. 2008 Jun. 3; 51(22):2195; Iakoubova et al., “KIF6 Trp719Arg polymorphism and the effect of statin therapy in elderly patients: results from the PROSPER study”, Eur J Cardiovasc Prev Rehabil. 2010 Apr. 20; and Shiffman et al., “Effect of pravastatin therapy on coronary events in carriers of the KIF6 719Arg allele from the cholesterol and recurrent events trial”, Am J. Cardiol. 2010 May 1; 105(9):1300-5).

[0017] There is a need for genetic markers that can be used to predict an individual's responsiveness to statins. For example, there is a growing need to better identify people who have a high chance of benefiting from statins, and those who have a low risk of developing side-effects. For example, severe myopathies represent a significant risk for a low percentage of the patient population, and this may be a particular concern for patients who are treated more aggressively with statins. Furthermore, different patients may have the same risk for adverse events but are more likely to benefit from a drug (such as statins) and this may justify use of the drug in those individuals who are more likely to benefit. Similarly, in individuals who are less likely to benefit from a drug but are at risk for adverse events, use of the drug in these individuals can be de-prioritized or delayed.

[0018] An example of a large trial which analyzed the benefits of statin treatment for reducing the risk of CVD in a large population was the JUPITER Study (described in Ridker et al., “Rosuvastatin to prevent vascular events in men and women with elevated C-reactive protein”, N Engl J. Med. 2008 November 20; 359(21):2195-207), which demonstrated that rosuvastatin (Crestor®) significantly reduced the incidence of major cardiovascular events (including MI, stroke, arterial revascularization, hospitalization for unstable angina, and death from cardiovascular causes) in a study of 17,802 individuals.

[0019] Use of HMG-CoA Reductase Inhibitors (Statins) for Venous Thrombosis (VT)

[0020] HMG-CoA reductase inhibitors (statins) can be used to reduce the risk of VT. For example, the following three case-control studies reported the association of statin use with a reduction in the number of VT events:

[0021] Simvastatin use was associated with a reduced risk of VT [OR=0.51 (0.29-0.91)] in a Group Health Cooperative study of postmenopausal women, which contained about 500 DVT cases and 2000 controls of whom about 5% were statin users (Doggen et al., “HMG CoA reductase inhibitors and the risk of venous thrombosis among postmenopausal women”, J Thromb Haemost 2004; 2: 700-1).

[0022] Current use of statins was associated with a reduced risk of venous thromboembolism [relative risk=0.74 (95% CI, 0.63-0.85)] in a VT study which contained 3366 adult patients (18-89 years) diagnosed with primary incident venous thromboembolism (2310 with venous thrombosis and 1056 with pulmonary embolism) (Sorenson et al., “Arterial cardiovascular events, statins, low-dose aspirin and subsequent risk of venous thromboembolism: a population based case-control study”, J Thromb Haemost 2009; 7: 521-8).

[0023] In another study, 154 of 4538 patients used statins (3.3%), as did 354 of 5914 control subjects (5.7%). The use of statins [odds ratio (OR) 0.45; 95% confidence interval (CI) 0.36-0.56] but not other lipid-lowering medications (OR 1.22; 95% CI 0.62-2.43), was associated with reduced VT risk as compared with individuals who did not use any lipid-lowering medication, after adjustment for age, sex, body mass index, atherosclerotic disease, anti-platelet therapy and use of vitamin K antagonists. Different types and various durations of statin therapy were all associated with reduced VT risk (Ramcharan et al., “HMG-CoA reductase inhibitors, other lipid-lowering medication, antiplatelet therapy, and the risk of venous thrombosis”, J Thromb Haemost 2009; 7: 514-20).

[0024] Identification of individuals who will respond to statin therapy for the prevention or treatment of VT has the further benefit of enabling these individuals to be targeted for statin treatment as an alternative to anticoagulant therapy, which has a high risk of bleeding events, thus providing a safer course of treatment.

[0025] Single Nucleotide Polymorphisms (SNPs)

[0026] The genomes of all organisms undergo spontaneous mutations in the course of their continuing evolution, generating variant forms of progenitor genetic sequences. Gusella, Ann Rev Biochem 55:831-854 (1986). A variant form may confer an evolutionary advantage or disadvantage relative to a progenitor form or may be neutral. In some instances, a variant form confers an evolutionary advantage to individual members of a species and is eventually incorporated into the DNA of many or most members of the species and effectively becomes the progenitor form. Additionally, the effects of a variant form may be both beneficial and detrimental, depending on the environment. For example, a heterozygous sickle cell mutation confers resistance to malaria, but a homozygous sickle cell mutation is usually lethal. In many cases, both progenitor and variant forms survive and co-exist in a species population. The coexistence of multiple forms of a genetic sequence segregating at appreciable frequencies is defined as a genetic polymorphism, which includes single nucleotide polymorphisms (SNPs).

[0027] Approximately 90% of all genetic polymorphisms in the human genome are SNPs. SNPs are single base positions in DNA at which different alleles, or alternative nucleotides, exist in a population. The SNP position (interchangeably referred to herein as SNP, SNP site, SNP locus, SNP marker, or marker) is usually preceded by and followed by highly conserved sequences (e.g., sequences that vary in less than 1/100 or 1/1000 members of the populations). An individual may be homozygous or heterozygous for an allele at each SNP position. A SNP can, in some instances, be referred to as a “cSNP” to denote that the nucleotide sequence containing the SNP is an amino acid coding sequence.

[0028] A SNP may arise from a substitution of one nucleotide for another at the polymorphic site. Substitutions can be transitions or transversions. A transition is the replacement of one purine nucleotide by another purine nucleotide, or one pyrimidine by another pyrimidine. A transversion is the replacement of a purine by a pyrimidine, or vice versa. A SNP may also be a single base insertion or deletion variant referred to as an “indel.” Weber et al., “Human diallelic insertion/deletion polymorphisms,” Am J Hum Genet. 71(4):854-62 (October 2002).

[0029] A synonymous codon change, or silent mutation/SNP (terms such as “SNP”, “polymorphism”, “mutation”, “mutant”, “variation”, and “variant” are used herein interchangeably), is one that does not result in a change of amino acid due to the degeneracy of the genetic code. A substitution that changes a codon coding for one amino acid to a codon coding for a different amino acid (i.e., a non-synonymous codon change) is referred to as a missense mutation. A nonsense mutation results in a type of non-synonymous codon change in which a stop codon is formed, thereby leading to premature termination of a polypeptide chain and a truncated protein. A read-through mutation is another type of non-synonymous codon change that causes the destruction of a stop codon, thereby resulting in an extended polypeptide product. While SNPs can be bi-, tri-, or tetra-allelic, the vast majority of SNPs are bi-allelic, and are thus often referred to as “bi-allelic markers,” or “di-allelic markers.”

[0030] As used herein, references to SNPs and SNP genotypes include individual SNPs and/or haplotypes, which are groups of SNPs that are generally inherited together. Haplotypes can have stronger correlations with diseases or other phenotypic effects compared with individual SNPs, and therefore may provide increased diagnostic accuracy in some cases. Stephens et al., Science 293:489-493 (July 2001).

[0031] Causative SNPs are those SNPs that produce alterations in gene expression or in the expression, structure, and/or function of a gene product, and therefore are most predictive of a possible clinical phenotype. One such class includes SNPs falling within regions of genes encoding a polypeptide product, i.e. cSNPs. These SNPs may result in an alteration of the amino acid sequence of the polypeptide product (i.e., non-synonymous codon changes) and give rise to the expression of a defective or other variant protein. Furthermore, in the case of nonsense mutations, a SNP may lead to premature termination of a polypeptide product. Such variant products can result in a pathological condition, e.g., genetic disease. Examples of genes in which a SNP within a coding sequence causes a genetic disease include sickle cell anemia and cystic fibrosis.

[0032] Causative SNPs do not necessarily have to occur in coding regions; causative SNPs can occur in, for example, any genetic region that can ultimately affect the expression, structure, and/or activity of the protein encoded by a nucleic acid. Such genetic regions include, for example, those involved in transcription, such as SNPs in transcription factor binding domains, SNPs in promoter regions, in areas involved in transcript processing, such as SNPs at intron-exon boundaries that may cause defective splicing, or SNPs in mRNA processing signal sequences such as polyadenylation signal regions. Some SNPs that are not causative SNPs nevertheless are in close association with, and therefore segregate with, a disease-causing sequence. In this situation, the presence of a SNP correlates with the presence of, or predisposition to, or an increased risk in developing the disease. These SNPs, although not causative, are nonetheless also useful for diagnostics, disease predisposition screening, and other uses.

[0033] An association study of a SNP and a specific disorder involves determining the presence or frequency of the SNP allele in biological samples from individuals with the disorder of interest, such as VT, and comparing the information to that of controls (i.e., individuals who do not have the disorder; controls may be also referred to as “healthy” or “normal” individuals) who are preferably of similar age and race. The appropriate selection of patients and controls is important to the success of SNP association studies. Therefore, a pool of individuals with well-characterized phenotypes is extremely desirable.

[0034] A SNP may be screened in diseased tissue samples or any biological sample obtained from a diseased individual, and compared to control samples, and selected for its increased (or decreased) occurrence in a specific pathological condition, such as pathologies related to VT. Once a statistically significant association is established between one or more SNP(s) and a pathological condition (or other phenotype) of interest, then the region around the SNP can optionally be thoroughly screened to identify the causative genetic locus/sequence(s) (e.g., causative SNP/mutation, gene, regulatory region, etc.) that influences the pathological condition or phenotype. Association studies may be conducted within the general population and are not limited to studies performed on related individuals in affected families (linkage studies).

[0035] Clinical trials have shown that patient response to treatment with pharmaceuticals is often heterogeneous. There is a continuing need to improve pharmaceutical agent design and therapy. In that regard, SNPs can be used to identify patients most suited to therapy with particular pharmaceutical agents (this is often termed “pharmacogenomics”). Similarly, SNPs can be used to exclude patients from certain treatment due to the patient's increased likelihood of developing toxic side effects or their likelihood of not responding to the treatment. Pharmacogenomics can also be used in pharmaceutical research to assist the drug development and selection process. Linder et al., Clinical Chemistry 43:254 (1997); Marshall, Nature Biotechnology 15:1249 (1997); International Patent Application WO 97/40462, Spectra Biomedical; and Schafer et al., Nature Biotechnology 16:3 (1998).

### SUMMARY OF THE INVENTION

[0036] Exemplary embodiments of the present invention relate to the identification of SNPs that are associated with risk for developing venous thrombosis (VT) and/or variability between individuals in their response to statins, particularly for the prevention or treatment of VT. These SNPs are useful for determining risk and/or statin response for primary and recurrent VT. Accordingly, the polymorphisms disclosed herein are directly useful as targets for the design of diagnostic and prognostic reagents and the development of therapeutic and preventive agents for use in the diagnosis, prognosis, treatment, and/or prevention of VT, as well as for predicting a patient's response to therapeutic agents such as statins, particularly for the treatment or prevention of VT.

[0037] Based on the identification of SNPs associated with risk for developing VT and/or variability between individuals in their response to statins, particularly for reducing the risk of VT, exemplary embodiments of the present invention also provide methods of detecting these variants as well as the design and preparation of detection reagents needed to accomplish this task. The invention specifically provides, for example, SNPs associated with VT risk and/or responsiveness to statin treatment for reducing VT risk, isolated nucleic acid molecules (including DNA and RNA molecules) containing these SNPs, variant proteins encoded by nucleic acid molecules containing such SNPs, antibodies to the encoded variant proteins, computer-based and data storage systems containing the novel SNP information, methods of detecting these SNPs in a test sample, methods of identifying individuals who have an altered (i.e., increased or decreased) risk of developing VT, methods for determining the risk of an individual for developing recurrent VT, methods of treating an individual who has an increased risk for VT, and methods for identifying individuals (e.g., determining a particular individual's likelihood) who have an altered (i.e., increased or decreased) likelihood of responding to drug treatment (especially statin treatment), particularly drug treatment of VT, based on the presence or absence of one or more particular nucleotides (alleles) at one or more SNP sites disclosed herein or the detection of one or more encoded variant products (e.g., variant mRNA transcripts or variant proteins), methods of identifying individuals who are more or less likely to respond to a treatment such as statins, methods of screening for compounds useful in the treatment or prevention of VT, compounds identified by these methods, methods of treating or preventing VT, etc.

[0038] Exemplary embodiments of the present invention further provide methods for selecting or formulating a treatment regimen (e.g., methods for determining whether or not to administer statin treatment to an individual having VT, or who is at risk for developing VT in the future, or who has previously had VT, methods for selecting a particular statin-based treatment regimen such as dosage and frequency of administration of statin, or a particular form/type of statin such as a particular pharmaceutical formulation or statin compound, methods for administering an alternative, non-statin-based treatment (such as warfarin or other anticoagulants, e.g., direct thrombin inhibitors such as dabigatran, or direct factor Xa inhibitors such as rivaroxaban or apixaban) to individuals who are predicted to be unlikely to respond positively to statin treatment, etc.), and methods for determining the likelihood of experiencing toxicity or other undesirable side effects from statin treatment, etc. Various embodiments of the present invention also provide methods for selecting individuals to whom a statin or other therapeutic will be administered based on the individual's genotype, and methods for selecting individuals for a clinical trial of a statin or other therapeutic agent based on the genotypes of the individuals (e.g., selecting individuals to participate in the trial who are most likely to respond positively from the statin treatment and/or excluding individuals from the trial who are unlikely to respond positively from the statin treatment based on their SNP genotype(s), or selecting individuals who are unlikely to respond positively to statins based on their SNP genotype(s) to participate in a clinical trial of another type of drug that may benefit them). Further embodiments of the present invention provide methods for reducing an individual's risk of developing VT using statin treatment, including preventing recurrent VT using statin treatment, when said individual carries one or more SNPs identified herein as being associated with statin response.

[0039] Tables 1 and 2 provides gene information, references to the identification of transcript sequences (SEQ ID NOS:1-84), encoded amino acid sequences (SEQ ID NOS:85-168), genomic sequences (SEQ ID NOS:338-500), transcript-based context sequences (SEQ ID NOS:169-337) and genomic-based context sequences (SEQ ID NOS:501-3098) that contain the SNPs of the present application, and extensive SNP information that includes observed alleles, allele frequencies, populations/ethnic groups in which alleles have been observed, information about the type of SNP and corresponding functional effect, and, for cSNPs, information about the encoded polypeptide product. The actual transcript sequences (SEQ ID NOS:1-84), amino acid sequences (SEQ ID NOS:85-168), genomic sequences (SEQ ID NOS:338-500), transcript-based SNP context sequences (SEQ ID NOS:169-337), and genomic-based SNP context sequences (SEQ ID NOS:501-3098) are provided in the Sequence Listing.

[0040] In certain exemplary embodiments, the invention provides methods for identifying an individual who has an altered risk for developing VT (including, for example, a first incidence and/or a recurrence of the disease, such as primary or recurrent VT), in which the method comprises detecting a single nucleotide polymorphism (SNP) in any one of the nucleotide sequences of SEQ ID NOS:1-84, SEQ ID NOS:169-337, SEQ ID NOS:338-500, and SEQ ID NOS:501-3098 in said individual's nucleic acids, wherein the SNP is specified in Table 1 and/or Table 2, and the presence of the SNP is indicative of an altered risk for VT in said individual. In certain embodiments, the VT is deep vein thrombosis (DVT) or pulmonary embolism (PE). In certain embodiments, the VT is recurrent VT. In certain exemplary embodiments of the invention, SNPs that occur naturally in the human genome are provided within isolated nucleic acid molecules. These SNPs are associated with response to statin treatment thereby reducing the risk of VT, such that they can have a variety of uses in the diagnosis, prognosis, treatment, and/or prevention of VT, and particularly in the treatment or prevention of VT using statins. In an alternative embodiment, a nucleic acid of the invention is an amplified polynucleotide, which is produced by amplification of a SNP-containing nucleic acid template. In another embodiment, the invention provides for a variant protein that is encoded by a nucleic acid molecule containing a SNP disclosed herein.

[0041] In further embodiments of the invention, reagents for detecting a SNP in the context of its naturally-occurring flanking nucleotide sequences (which can be, e.g., either DNA or mRNA) are provided. In particular, such a reagent may be in the form of, for example, a hybridization probe or an amplification primer that is useful in the specific detection of a SNP of interest. In an alternative embodiment, a protein detection reagent is used to detect a variant protein that is encoded by a nucleic acid molecule containing a SNP disclosed herein. A preferred embodiment of a protein detection reagent is an antibody or an antigen-reactive antibody fragment. Various embodiments of the invention also provide kits comprising SNP detection reagents, and methods for detecting the SNPs disclosed herein by employing the SNP detection reagents. An exemplary embodiment of the present invention provides a kit comprising a SNP detection reagent for use in determining whether a human's risk for VT is reduced by treatment with statins based upon the presence or absence of a particular allele of one or more SNPs disclosed herein.

[0042] In various embodiments, the present invention provides methods for evaluating whether an individual is likely (or unlikely) to respond to statin treatment (i.e., benefit from statin treatment)), particularly statin treatment for reducing the risk of VT (including recurrent VT), by detecting the presence or absence of one or more SNP alleles disclosed herein. In certain embodiments, the VT is DVT or PE. In certain embodiments, the VT is recurrent VT. The present invention also provides methods of identifying an individual having an increased or decreased risk of developing VT (including recurrent VT) by detecting the presence or absence of one or more SNP alleles disclosed herein. In certain embodiments, the VT is DVT or PE. In other embodiments, a method for diagnosis or prognosis of VT by detecting the presence or absence of one or more SNP alleles disclosed herein is provided.

[0043] The nucleic acid molecules of the invention can be inserted in an expression vector, such as to produce a variant protein in a host cell. Thus, the present invention also provides for a vector comprising a SNP-containing nucleic acid molecule, genetically-engineered host cells containing the vector, and methods for expressing a recombinant variant protein using such host cells. In another specific embodiment, the host cells, SNP-containing nucleic acid molecules, and/or variant proteins can be used as targets in a method for screening and identifying therapeutic agents or pharmaceutical compounds useful in the treatment or prevention of VT.

[0044] An aspect of this invention is a method for treating or preventing VT (including, for example, a first occurrence and/or a recurrence of the disease, such as primary or recurrent VT), in a human subject wherein said human subject harbors a SNP, gene, transcript, and/or encoded protein identified in Tables 1 and 2, which method comprises administering to said human subject a therapeutically or prophylactically effective amount of one or more agents counteracting the effects of the disease, such as by inhibiting (or stimulating) the activity of a gene, transcript, and/or encoded protein identified in Tables 1 and 2.

[0045] Another aspect of this invention is a method for identifying an agent useful in therapeutically or prophylactically treating VT, in a human subject wherein said human subject harbors a SNP, gene, transcript, and/or encoded protein identified in Tables 1 and 2, which method comprises contacting the gene, transcript, or encoded protein with a candidate agent under conditions suitable to allow formation of a binding complex between the gene, transcript, or encoded protein and the candidate agent and detecting the formation of the binding complex, wherein the presence of the complex identifies said agent.

[0046] Another aspect of this invention is a method for treating or preventing VT, in a human subject, in which the method comprises:

[0047] (i) determining that said human subject harbors a SNP, gene, transcript, and/or encoded protein identified in Tables 1 and 2, and

[0048] (ii) administering to said subject a therapeutically or prophylactically effective amount of one or more agents counteracting the effects of the disease, such as statins.

[0049] Another aspect of the invention is a method for identifying a human who is likely to benefit from statin treatment, in which the method comprises detecting an allele of one or more SNPs disclosed herein in said human's nucleic acids, wherein the presence of the allele indicates that said human is likely to benefit from statin treatment.

[0050] Another aspect of the invention is a method for identifying a human who is likely to benefit from statin treatment, in which the method comprises detecting an allele of one or more SNPs that are in LD with one or more SNPs disclosed herein in said human's nucleic acids, wherein the presence of the allele of the LD SNP indicates that said human is likely to benefit from statin treatment.

[0051] Many other uses and advantages of the present invention will be apparent to those skilled in the art upon review of the detailed description of the exemplary embodiments herein. Solely for clarity of discussion, the invention is described in the sections below by way of non-limiting examples.

### Description of the Text (ASCII) Files Submitted Electronically Via EFS-WEB

[0052] The following three text (ASCII) files are submitted electronically via EFS-Web as part of the instant application:

[0053] 1) File SEQLIST_CD000029ORD.txt provides the Sequence Listing. The Sequence Listing provides the transcript sequences (SEQ ID NOS:1-84) and protein sequences (SEQ ID NOS:85-P 168) as referred to in Table 1, and genomic sequences (SEQ ID NOS:338-500) as referred to in Table 2, for each gene (or genomic region for intergenic SNPs) that contains one or more statin response-associated SNPs of the present invention. Also provided in the Sequence Listing are context sequences flanking each SNP, including both transcript-based context sequences as referred to in Table 1 (SEQ ID NOS:169-337) and genomic-based context sequences as referred to in Table 2 (SEQ ID NOS:501-3098). The context sequences generally provide 100 bp upstream (5′) and 100 bp downstream (3′) of each SNP, with the SNP in the middle of the context sequence, for a total of 200 bp of context sequence surrounding each SNP. File SEQLIST_CD000029ORD.txt is 22,428 KB in size, and was created on Oct. 31, 2011.

[0054] 2) File TABLE1_CD000029ORD.txt provides Table 1, which is 172 KB in size and was created on Oct. 28, 2011.

[0055] 3) File TABLE2_CD000029ORD.txt provides Table 2, which is 1,843 KB in size and was created on Oct. 28, 2011.

[0056] These three text files are hereby incorporated by reference pursuant to 37 CFR 1.77(b)(4).

LENGTHY TABLES
The patent application contains a lengthy table section. A copy of the table is available in electronic form from the USPTO web site (http://seqdata.uspto.gov/?pageRequest=docDetail&DocID=US20120108651A1). An electronic copy of the table will also be available from the USPTO upon request and payment of the fee set forth in 37 CFR 1.19(b)(3).

### DESCRIPTION OF THE FIGURE

[0057] The FIGURE shows two SNP in the F11 gene significantly associated with statin response for reducing VT risk: F11 SNP rs2036914 and F11 SNP rs2289252. The FIGURE shows risk of VT according to statin use for rs2289252, rs2036914, and Factor V Leiden genotypes. The odds ratios (shown with 95% confidence intervals) were adjusted for sex and age.

### DESCRIPTION OF TABLE 1 AND TABLE 2

[0058] Table 1 and Table 2 (both submitted electronically via EFS-Web as part of the instant application) disclose the SNP and associated gene/transcript/protein information of the present invention. For each gene, Table 1 provides a header containing gene, transcript and protein information, followed by a transcript and protein sequence identifier (SEQ ID NO), and then SNP information regarding each SNP found in that gene/transcript including the transcript context sequence. For each gene in Table 2, a header is provided that contains gene and genomic information, followed by a genomic sequence identifier (SEQ ID NO) and then SNP information regarding each SNP found in that gene, including the genomic context sequence.

[0059] Note that SNP markers may be included in both Table 1 and Table 2; Table 1 presents the SNPs relative to their transcript sequences and encoded protein sequences, whereas Table 2 presents the SNPs relative to their genomic sequences. In some instances Table 2 may also include, after the last gene sequence, genomic sequences of one or more intergenic regions, as well as SNP context sequences and other SNP information for any SNPs that lie within these intergenic regions. Additionally, in either Table 1 or 2 a “Related Interrogated SNP” may be listed following a SNP which is determined to be in LD with that interrogated SNP according to the given Power value. SNPs can be readily cross-referenced between all Tables based on their Celera hCV (or, in some instances, hDV) identification numbers and/or public rs identification numbers, and to the Sequence Listing based on their corresponding SEQ ID NOs.

[0060] The gene/transcript/protein information includes:
[0061] a gene number (1 through n, where n=the total number of genes in the Table),
[0062] a gene symbol, along with an Entrez gene identification number (Entrez Gene database, National Center for Biotechnology Information (NCBI), National Library of Medicine, National Institutes of Health) (if Entrez gene information is unavailable, then Ensembl gene information is used instead)
[0063] a gene name,
[0064] an accession number for the transcript (e.g., RefSeq NM number and/or a Celera hCT identification number) (Table 1 only) (if RefSeq transcript information is unavailable, then Ensembl transcript information is used instead),
[0065] an accession number for the protein (e.g., RefSeq NP number and/or a Celera hCP identification number) (Table 1 only) (if RefSeq protein information is unavailable, then Ensembl protein information is used instead),
[0066] the chromosome number of the chromosome on which the gene is located,
[0067] an OMIM (“Online Mendelian Inheritance in Man” database, Johns Hopkins University/NCBI) public reference number for the gene, and OMIM information such as alternative gene/protein name(s) and/or symbol(s) in the OMIM entry.

[0068] Note that, due to the presence of alternative splice forms, multiple transcript/protein entries may be provided for a single gene entry in Table 1; i.e., for a single Gene Number, multiple entries may be provided in series that differ in their transcript/protein information and sequences.

[0069] Following the gene/transcript/protein information is a transcript context sequence (Table 1), or a genomic context sequence (Table 2), for each SNP within that gene.

[0070] After the last gene sequence, Table 2 may include additional genomic sequences of intergenic regions (in such instances, these sequences are identified as “Intergenic region:” followed by a numerical identification number), as well as SNP context sequences and other SNP information for any SNPs that lie within each intergenic region (such SNPs are identified as “INTERGENIC” for SNP type).

[0071] Note that the transcript, protein, and transcript-based SNP context sequences are all provided in the Sequence Listing. The transcript-based SNP context sequences are provided in both Table 1 and also in the Sequence Listing. The genomic and genomic-based SNP context sequences are provided in the Sequence Listing. The genomic-based SNP context sequences are provided in both Table 2 and in the Sequence Listing. SEQ ID NOs are indicated in Table 1 for the transcript-based context sequences (SEQ ID NOS:169-337); SEQ ID NOs are indicated in Table 2 for the genomic-based context sequences (SEQ ID NOS:501-3098).

[0072] The SNP information includes:
[0073] Context sequence (taken from the transcript sequence in Table 1, the genomic sequence in Table 2) with the SNP represented by its IUB code, including 100 bp upstream (5′) of the SNP position plus 100 bp downstream (3′) of the SNP position (the transcript-based SNP context sequences in Table 1 are provided in the Sequence Listing as SEQ ID NOS:169-337; the genomic-based SNP context sequences in Table 2 are provided in the Sequence Listing as SEQ ID NOS:501-3098).
[0074] Celera hCV internal identification number for the SNP (in some instances, an “hDV” number is given instead of an “hCV” number).
[0075] The corresponding public identification number for the SNP, the rs number.
[0076] “SNP Chromosome Position” indicates the nucleotide position of the SNP along the entire sequence of the chromosome as provided in NCBI Genome Build 37.
[0077] SNP position (nucleotide position of the SNP within the given transcript sequence (Table 1) or within the given genomic sequence (Table 2)).
[0078] “Related Interrogated SNP” is the interrogated SNP with which the listed SNP is in LD at the given value of Power.
[0079] SNP source (may include any combination of one or more of the following five codes, depending on which internal sequencing projects and/or public databases the SNP has been observed in: “Applera”=SNP observed during the re-sequencing of genes and regulatory regions of 39 individuals, “Celera”=SNP observed during shotgun sequencing and assembly of the Celera human genome sequence, “Celera Diagnostics”=SNP observed during re-sequencing of nucleic acid samples from individuals who have a disease, “dbSNP”=SNP observed in the dbSNP public database, “HGBASE”=SNP observed in the HGBASE public database, “HGMD”=SNP observed in the Human Gene Mutation Database (HGMD) public database, “HapMap”=SNP observed in the International HapMap Project public database, “CSNP”=SNP observed in an internal Applied Biosystems (Foster City, Calif.) database of coding SNPS (cSNPs).

[0080] Note that multiple “Applera” source entries for a single SNP indicate that the same SNP was covered by multiple overlapping amplification products and the re-sequencing results (e.g., observed allele counts) from each of these amplification products is being provided.
[0081] Population/allele/allele count information in the format of [population1(first_allele,countlsecond_allele,count)population2(first_allele,countlsecond_allele,coun t) total (first_allele,total count|second_allele,total count)]. The information in this field includes populations/ethnic groups in which particular SNP alleles have been observed (“cau”=Caucasian, “his”=Hispanic, “chn”=Chinese, and “afr”=African-American, “jpn”=Japanese, “ind”=Indian, “mex”=Mexican, “ain”=“American Indian, “cra”=Celera donor, “no_pop”=no population information available), identified SNP alleles, and observed allele counts (within each population group and total allele counts), where available [“-” in the allele field represents a deletion allele of an insertion/deletion (“indel”) polymorphism (in which case the corresponding insertion allele, which may be comprised of one or more nucleotides, is indicated in the allele field on the opposite side of the “|”); “-” in the count field indicates that allele count information is not available]. For certain SNPs from the public dbSNP database, population/ethnic information is indicated as follows (this population information is publicly available in dbSNP): “HISP1”=human individual DNA (anonymized samples) from 23 individuals of self-described HISPANIC heritage; “PAC1”=human individual DNA (anonymized samples) from 24 individuals of self-described PACIFIC RIM heritage; “CAUC1”=human individual DNA (anonymized samples) from 31 individuals of self-described CAUCASIAN heritage; “AFR1”=human individual DNA (anonymized samples) from 24 individuals of self-described AFRICAN/AFRICAN AMERICAN heritage; “P1”=human individual DNA (anonymized samples) from 102 individuals of self-described heritage; “PA130299515”; “SC_{—}12_A”=SANGER 12 DNAs of Asian origin from Corielle cell repositories, 6 of which are male and 6 female; “SC_{—}12_C”=SANGER 12 DNAs of Caucasian origin from Corielle cell repositories from the CEPH/UTAH library, six male and six female; “SC_{—}12_AA”=SANGER 12 DNAs of African-American origin from Corielle cell repositories 6 of which are male and 6 female; “SC_{—}95_C”═SANGER 95 DNAs of Caucasian origin from Corielle cell repositories from the CEPH/UTAH library; and “SC_{—}12_CA”=Caucasians−12 DNAs from Corielle cell repositories that are from the CEPH/UTAH library, six male and six female.

[0082] Note that for SNPs of “Applera” SNP source, genes/regulatory regions of 39 individuals (20 Caucasians and 19 African Americans) were re-sequenced and, since each SNP position is represented by two chromosomes in each individual (with the exception of SNPs on X and Y chromosomes in males, for which each SNP position is represented by a single chromosome), up to 78 chromosomes were genotyped for each SNP position. Thus, the sum of the African-American (“afr”) allele counts is up to 38, the sum of the Caucasian allele counts (“cau”) is up to 40, and the total sum of all allele counts is up to 78.

[0083] Note that semicolons separate population/allele/count information corresponding to each indicated SNP source; i.e., if four SNP sources are indicated, such as “Celera,” “dbSNP,” “HGBASE,” and “HGMD,” then population/allele/count information is provided in four groups which are separated by semicolons and listed in the same order as the listing of SNP sources, with each population/allele/count information group corresponding to the respective SNP source based on order; thus, in this example, the first population/allele/count information group would correspond to the first listed SNP source (Celera) and the third population/allele/count information group separated by semicolons would correspond to the third listed SNP source (HGBASE); if population/allele/count information is not available for any particular SNP source, then a pair of semicolons is still inserted as a place-holder in order to maintain correspondence between the list of SNP sources and the corresponding listing of population/allele/count information.
[0084] SNP type (e.g., location within gene/transcript and/or predicted functional effect) [“MIS-SENSE MUTATION”=SNP causes a change in the encoded amino acid (i.e., a non-synonymous coding SNP); “SILENT MUTATION”=SNP does not cause a change in the encoded amino acid (i.e., a synonymous coding SNP); “STOP CODON MUTATION”=SNP is located in a stop codon; “NONSENSE MUTATION”=SNP creates or destroys a stop codon; “UTR 5”=SNP is located in a 5′ UTR of a transcript; “UTR 3”=SNP is located in a 3′ UTR of a transcript; “PUTATIVE UTR 5”=SNP is located in a putative 5′ UTR; “PUTATIVE UTR 3”=SNP is located in a putative 3′ UTR; “DONOR SPLICE SITE”=SNP is located in a donor splice site (5′ intron boundary); “ACCEPTOR SPLICE SITE”=SNP is located in an acceptor splice site (3′ intron boundary); “CODING REGION”=SNP is located in a protein-coding region of the transcript; “EXON”=SNP is located in an exon; “INTRON”=SNP is located in an intron; “hmCS”=SNP is located in a human-mouse conserved segment; “TFBS”=SNP is located in a transcription factor binding site; “UNKNOWN”=SNP type is not defined; “INTERGENIC”=SNP is intergenic, i.e., outside of any gene boundary].
[0085] Protein coding information (Table 1 only), where relevant, in the format of [protein SEQ ID NO, amino acid position, (amino acid-1, codon1) (amino acid-2, codon2)]. The information in this field includes SEQ ID NO of the encoded protein sequence, position of the amino acid residue within the protein identified by the SEQ ID NO that is encoded by the codon containing the SNP, amino acids (represented by one-letter amino acid codes) that are encoded by the alternative SNP alleles (in the case of stop codons, “X” is used for the one-letter amino acid code), and alternative codons containing the alternative SNP nucleotides which encode the amino acid residues (thus, for example, for missense mutation-type SNPs, at least two different amino acids and at least two different codons are generally indicated; for silent mutation-type SNPs, one amino acid and at least two different codons are generally indicated, etc.). In instances where the SNP is located outside of a protein-coding region (e.g., in a UTR region), “None” is indicated following the protein SEQ ID NO.

### DESCRIPTION OF TABLE 3

[0086] Table 3 provides a list of LD SNPs that are related to and derived from certain interrogated SNPs. The interrogated SNPs, which are shown in column 1 (which indicates the hCV identification numbers of each interrogated SNP) and column 2 (which indicates the public rs identification numbers of each interrogated SNP) of Table 3, are statistically significantly associated with VT risk (particularly risk for recurrent VT) and/or statin response for reducing VT risk, as described and shown herein, particularly in Tables 4-9 and in the Examples sections below. The LD SNPs are provided as an example of SNPs which can also serve as markers for disease association based on their being in LD with an interrogated SNP. The criteria and process of selecting such LD SNPs, including the calculation of the r² value and the threshold r² value, are described in Example 7, below.

[0087] In Table 3, the column labeled “Interrogated SNP” presents each marker as identified by its unique hCV identification number. The column labeled “Interrogated rs” presents the publicly known rs identification number for the corresponding hCV number. The column labeled “LD SNP” presents the hCV numbers of the LD SNPs that are derived from their corresponding interrogated SNPs. The column labeled “LD SNP rs” presents the publicly known rs identification number for the corresponding hCV number. The column labeled “Power” presents the level of power where the r² threshold is set. For example, when power is set at 0.51, the threshold r² value calculated therefrom is the minimum r² that an LD SNP must have in reference to an interrogated SNP, in order for the LD SNP to be classified as a marker capable of being associated with a disease phenotype at greater than 51% probability. The column labeled “Threshold r²” presents the minimum value of r² that an LD SNP must meet in reference to an interrogated SNP in order to qualify as an LD SNP. The column labeled “r²” presents the actual r² value of the LD SNP in reference to the interrogated SNP to which it is related.

### DESCRIPTION OF TABLES 4-9

[0088] Tables 4-9 provide the results of analyses for SNPs disclosed in Tables 1 and 2 (SNPs can be cross-referenced between all the tables herein based on their hCV and/or rs identification numbers).

[0089] The analyses in Tables 4-6 are further described in Example 1 below.

[0090] The analysis in Table 7 is further described in Example 3 below.

[0091] The analysis in Table 8 is further described in Example 4 below.

[0092] The analysis in Table 9 is further described in Example 5 below.

[0093] The results shown in Tables 4-9 provide support for the association of these SNPs with VT risk, particularly risk for recurrent VT, and/or response to statin treatment for reducing the risk of VT.

[0094] In Tables 4-6, “statin_{—}1” or “statin user” are equivalent designations that refer to individuals who were using statins, and “statin_{—}0” or “statin nonuser” are equivalent designations that refer to individuals who were not using statins.

[0095] Throughout Tables 4-9, “P” or “P-value” indicates the p-value, “p(int)” indicates the p(interaction) value, “OR” refers to the odds ratio, “HR” refers to the hazard ratio, and “95% CI” refers to the 95% confidence interval for the odds ratio or hazard ratio.

[0096] In Tables 7-9, “P_DF2” indicates the two degrees of freedom Wald Test p-value.

[0097] In Tables 8-9, “HW(control)ₚExact” indicates the Hardy-Weinberg p-value for all controls in the study.

[0098] With respect to drug response (e.g., response to a statin), if the OR or HR of those treated with the drug (e.g., a statin) compared with those treated with a placebo within a particular genotype (or with a particular allele) is less than one, this indicates that an individual with this particular genotype or allele would benefit from the drug (an OR or HR equal to one would indicate that the drug has no effect). In contrast, with respect to drug response, if the OR or HR is greater than one for a particular allele, then this indicates that an individual with the other alternative allele would benefit from the drug. As used herein, the term “benefit” (with respect to a preventive or therapeutic drug treatment) is defined as achieving a reduced risk for a disease that the drug is intended to treat or prevent (e.g., VT) by administering the drug treatment, compared with the risk for the disease in the absence of receiving the drug treatment (or receiving a placebo in lieu of the drug treatment) for the same genotype.

[0099] With respect to disease risk, an OR or HR that is greater than one indicates that a given allele is a risk allele (which may also be referred to as a susceptibility allele), whereas an OR or HR that is less than one indicates that a given allele is a non-risk allele (which may also be referred to as a protective allele). For a given risk allele, the other alternative allele at the SNP position (which can be derived from the information provided in Tables 1-2, for example) may be considered a non-risk allele. For a given non-risk allele, the other alternative allele at the SNP position may be considered a risk allele. Thus, with respect to disease risk, if the OR or HR for a particular allele at a SNP position is greater than one, this indicates that an individual with this particular allele has a higher risk for the disease than an individual who has the other allele at the SNP position. In contrast, if the OR for a particular allele is less than one, this indicates that an individual with this particular allele has a reduced risk for the disease compared with an individual who has the other allele at the SNP position.

### DETAILED DESCRIPTION OF THE INVENTION

[0100] Exemplary embodiments of the present invention provide SNPs associated with risk for developing venous thrombosis (VT) (interchangeably referred to as venous thromboembolism (VTE)) and/or response to statin treatment, particularly statin treatment for reducing the risk of VT, and methods for their use. The present invention further provides nucleic acid molecules containing these SNPs, methods and reagents for the detection of the SNPs disclosed herein, uses of these SNPs for the development of detection reagents, and assays or kits that utilize such reagents. The statin response-associated SNPs disclosed herein are particularly useful for predicting, screening for, and evaluating response to statin treatment, particularly for prevention or treatment of VT using statins, in humans. The SNPs disclosed herein are also useful for diagnosing, prognosing, screening for, and evaluating predisposition to VT in humans. Furthermore, such SNPs and their encoded products are useful targets for the development of therapeutic and preventive agents.

[0101] Thus, exemplary embodiments of the present invention provide individual SNPs associated with risk for developing VT and/or response to statin treatment, particularly statin treatment for reducing the risk of VT, as well as combinations of SNPs and haplotypes, polymorphic/variant transcript sequences (SEQ ID NOS:1-84) and genomic sequences (SEQ ID NOS:338-500) containing SNPs, encoded amino acid sequences (SEQ ID NOS:85-168), and both transcript-based SNP context sequences (SEQ ID NOS:169-337) and genomic-based SNP context sequences (SEQ ID NOS:501-3098) (transcript sequences, protein sequences, and transcript-based SNP context sequences are provided in Table 1 and the Sequence Listing; genomic sequences and genomic-based SNP context sequences are provided in Table 2 and the Sequence Listing), methods of detecting these polymorphisms in a test sample, methods of determining an individual's risk for developing VT, methods of determining if an individual is likely to respond to a particular treatment such as statins (particularly for treating or preventing VT), methods of screening for compounds useful for treating VT, compounds identified by these screening methods, methods of using the disclosed SNPs to select a treatment/preventive strategy or therapeutic agent, and methods of treating or preventing VT.

[0102] Exemplary embodiments of the present invention further provide methods for selecting or formulating a treatment regimen (e.g., methods for determining whether or not to administer statin treatment to an individual having VT, or who is at risk for developing VT in the future, or who has previously had VT, methods for selecting a particular statin-based treatment regimen such as dosage and frequency of administration of statin, or a particular form/type of statin such as a particular pharmaceutical formulation or statin compound, methods for administering an alternative, non-statin-based treatment (such as warfarin or other anticoagulants, e.g., direct thrombin inhibitors such as dabigatran, or direct factor Xa inhibitors such as rivaroxaban or apixaban) to individuals who are predicted to be unlikely to respond positively to statin treatment, etc.), and methods for determining the likelihood of experiencing toxicity or other undesirable side effects from statin treatment, etc. The present invention also provides methods for selecting individuals to whom a statin or other therapeutic will be administered based on the individual's genotype, and methods for selecting individuals for a clinical trial of a statin or other therapeutic agent based on the genotypes of the individuals (e.g., selecting individuals to participate in the trial who are most likely to respond positively from the statin treatment and/or excluding individuals from the trial who are unlikely to respond positively from the statin treatment based on their SNP genotype(s), or selecting individuals who are unlikely to respond positively to statins based on their SNP genotype(s) to participate in a clinical trial of another type of drug that may benefit them).

[0103] Exemplary embodiments of the present invention may include novel SNPs associated with VT risk and/or response to statin treatment, as well as SNPs that were previously known in the art, but were not previously known to be associated with VT risk and/or response to statin treatment. Accordingly, the present invention may provide novel compositions and methods based on novel SNPs disclosed herein, and may also provide novel methods of using known, but previously unassociated, SNPs in methods relating to, for example, methods relating to evaluating an individual's likelihood of responding to statin treatment (particularly statin treatment, including preventive treatment, of VT, including recurrent VT), evaluating an individual's likelihood of having or developing VT, and predicting the likelihood of an individual experiencing a reccurrence of VT. In Tables 1 and 2, known SNPs are identified based on the public database in which they have been observed, which is indicated as one or more of the following SNP types: “dbSNP”=SNP observed in dbSNP, “HGBASE”=SNP observed in HGBASE, and “HGMD”=SNP observed in the Human Gene Mutation Database (HGMD).

[0104] Particular alleles of the SNPs disclosed herein can be associated with either an increased likelihood of responding to statin treatment (particularly for reducing the risk of VT) or increased risk of developing VT, or a decreased likelihood of responding to statin treatment or a decreased risk of developing VT. Thus, whereas certain SNPs (or their encoded products) can be assayed to determine whether an individual possesses a SNP allele that is indicative of an increased likelihood of responding to statin treatment or an increased risk of developing VT, other SNPs (or their encoded products) can be assayed to determine whether an individual possesses a SNP allele that is indicative of a decreased likelihood of responding to statin treatment or a decreased risk of developing VT. Similarly, particular alleles of the SNPs disclosed herein can be associated with either an increased or decreased likelihood of having a reccurrence of VT, or of experiencing toxic effects from a particular treatment or therapeutic compound such as statins, etc. The term “altered” may be used herein to encompass either of these two possibilities (e.g., either an increased or a decreased likelihood/risk). SNP alleles that are associated with a decreased risk of having or developing VT may be referred to as “protective” alleles, and SNP alleles that are associated with an increased risk of having or developing VT may be referred to as “susceptibility” alleles, “risk” alleles, or “risk factors”.

[0105] Those skilled in the art will readily recognize that nucleic acid molecules may be double-stranded molecules and that reference to a particular site on one strand refers, as well, to the corresponding site on a complementary strand. In defining a SNP position, SNP allele, or nucleotide sequence, reference to an adenine, a thymine (uridine), a cytosine, or a guanine at a particular site on one strand of a nucleic acid molecule also defines the thymine (uridine), adenine, guanine, or cytosine (respectively) at the corresponding site on a complementary strand of the nucleic acid molecule. Thus, reference may be made to either strand in order to refer to a particular SNP position, SNP allele, or nucleotide sequence. Probes and primers, may be designed to hybridize to either strand and SNP genotyping methods disclosed herein may generally target either strand. Throughout the specification, in identifying a SNP position, reference is generally made to the protein-encoding strand, only for the purpose of convenience.

[0106] References to variant peptides, polypeptides, or proteins of the present invention include peptides, polypeptides, proteins, or fragments thereof, that contain at least one amino acid residue that differs from the corresponding amino acid sequence of the art-known peptide/polypeptide/protein (the art-known protein may be interchangeably referred to as the “wild-type,” “reference,” or “normal” protein). Such variant peptides/polypeptides/proteins can result from a codon change caused by a nonsynonymous nucleotide substitution at a protein-coding SNP position (i.e., a missense mutation) disclosed by the present invention. Variant peptides/polypeptides/proteins of the present invention can also result from a nonsense mutation (i.e., a SNP that creates a premature stop codon, a SNP that generates a read-through mutation by abolishing a stop codon), or due to any SNP disclosed by the present invention that otherwise alters the structure, function, activity, or expression of a protein, such as a SNP in a regulatory region (e.g. a promoter or enhancer) or a SNP that leads to alternative or defective splicing, such as a SNP in an intron or a SNP at an exon/intron boundary. As used herein, the terms “polypeptide,” “peptide,” and “protein” are used interchangeably.

[0107] As used herein, an “allele” may refer to a nucleotide at a SNP position (wherein at least two alternative nucleotides exist in the population at the SNP position, in accordance with the inherent definition of a SNP) or may refer to an amino acid residue that is encoded by the codon which contains the SNP position (where the alternative nucleotides that are present in the population at the SNP position form alternative codons that encode different amino acid residues). An “allele” may also be referred to herein as a “variant”. Also, an amino acid residue that is encoded by a codon containing a particular SNP may simply be referred to as being encoded by the SNP.

[0108] A phrase such as “represented by”, “as represented by”, “as shown by”, “as symbolized by”, or “as designated by” may be used herein to refer to a SNP within a sequence (e.g., a polynucleotide context sequence surrounding a SNP), such as in the context of “a polymorphism as represented by position 101 of SEQ ID NO:X or its complement”. Typically, the sequence surrounding a SNP may be recited when referring to a SNP, however the sequence is not intended as a structural limitation beyond the specific SNP position itself. Rather, the sequence is recited merely as a way of referring to the SNP (in this example, “SEQ ID NO:X or its complement” is recited in order to refer to the SNP located at position 101 of SEQ ID NO:X, but SEQ ID NO:X or its complement is not intended as a structural limitation beyond the specific SNP position itself). In other words, it is recognized that the context sequence of SEQ ID NO:X in this example may contain one or more polymorphic nucleotide positions outside of position 101 and therefore an exact match over the full-length of SEQ ID NO:X is irrelevant since SEQ ID NO:X is only meant to provide context for referring to the SNP at position 101 of SEQ ID NO:X. Likewise, the length of the context sequence is also irrelevant (100 nucleotides on each side of a SNP position has been arbitrarily used in the present application as the length for context sequences merely for convenience and because 201 nucleotides of total length is expected to provide sufficient uniqueness to unambiguously identify a given nucleotide sequence). Thus, since a SNP is a variation at a single nucleotide position, it is customary to refer to context sequence (e.g., SEQ ID NO:X in this example) surrounding a particular SNP position in order to uniquely identify and refer to the SNP. Alternatively, a SNP can be referred to by a unique identification number such as a public “rs” identification number or an internal “hCV” identification number, such as provided herein for each SNP (e.g., in Tables 1-2). For example, in the instant application, “rs2036914”, “hCV12066124”, and “position 101 of SEQ ID NO:713” all refer to the same SNP.

[0109] As used herein, the term “benefit” (with respect to a preventive or therapeutic drug treatment, such as statin treatment) is defined as achieving a reduced risk for a disease that the drug is intended to treat or prevent (e.g., VT) by administrating the drug treatment, compared with the risk for the disease in the absence of receiving the drug treatment (or receiving a placebo in lieu of the drug treatment) for the same genotype. The term “benefit” may be used herein interchangeably with terms such as “respond positively” or “positively respond”.

[0110] As used herein, the terms “drug” and “therapeutic agent” are used interchangeably, and may include, but are not limited to, small molecule compounds, biologics (e.g., antibodies, proteins, protein fragments, fusion proteins, glycoproteins, etc.), nucleic acid agents (e.g., antisense, RNAi/siRNA, and microRNA molecules, etc.), vaccines, etc., which may be used for therapeutic and/or preventive treatment of a disease (e.g., VT).

[0111] Examples of statins (also known as HMG-CoA reductase inhibitors) include, but are not limited to, atorvastatin (Lipitor®), rosuvastatin (Crestor®), pravastatin (Pravachol®), simvastatin (Zocor®), fluvastatin (Lescol®), and lovastatin (Mevacor®), as well as combination therapies that include a statin such as simvastatin+ezetimibe (Vytorin®), lovastatin+niacin (Advicor®), atorvastatin+amlodipine besylate (Caduet®), and simvastatin+niacin (Simcor®).

[0112] Certain exemplary embodiments of the invention provide the following compositions and uses: (1) a reagent (such as an allele-specific probe or primer, or any other oligonucleotide or other reagent suitable for detecting a polymorphism disclosed herein, which can include detection of any allele of the polymorphism) for use as a diagnostic or predictive agent for determining VT risk and/or statin response, particularly for reducing the risk of VT; (2) a kit, device, array, or assay component that includes or is coupled with the reagent of (1) above for use in determining VT risk and/or statin response, particularly for reducing the risk of VT; (3) the use of the reagent of (1) above for the manufacture of a kit, device, array, or assay component for determining VT risk and/or statin response, particularly for reducing the risk of VT; and (4) the use of a polymorphism disclosed herein for the manufacture of a reagent for use as a diagnostic or predictive agent for determining VT risk and/or statin response, particularly for reducing the risk of VT.

[0113] The various methods described herein, such as correlating the presence or absence of a polymorphism with the predicted response of an individual to a drug such as a statin, particularly for reducing the risk for VT, and/or correlating the presence or absence of a polymorphism with an altered (e.g., increased or decreased) risk (or no altered risk) for developing VT, can be carried out by automated methods such as by using a computer (or other apparatus/devices such as biomedical devices, laboratory instrumentation, or other apparatus/devices having a computer processor) programmed to carry out any of the methods described herein. For example, computer software (which may be interchangeably referred to herein as a computer program) can perform the step of correlating the presence or absence of a polymorphism in an individual with an altered (e.g., increased or decreased) response (or no altered response) to statin treatment for reducing the risk for VT, and/or correlating the presence or absence of a polymorphism with an altered (e.g., increased or decreased) risk (or no altered risk) for developing VT. Accordingly, certain embodiments of the invention provide a computer (or other apparatus/device) programmed to carry out any of the methods described herein.

[0114] Reagants, and kits containing the reagents, for detecting a SNP disclosed herein can be manufactured in compliance with regulatory requirements for clinical diagnostic use, such as those set forth by the United States Food and Drug Administration (FDA). Reagents and kits can be manufactured in compliance with “good manufacturing practice” (GMP) guidelines, such as “current good manufacturing practices” (cGMP) guidelines in the United States. Furthermore, reagents and kits can be registed with the FDA (such as by satisfying 510(k) Pre-Market Notification (PMN) requirements or obtaining Pre-Market Approval (PMA)). Reagents (particularly reagents for clinical diagnostic use) for detecting a SNP disclosed herein can be classified by the FDA (or other agency) as an analyte specific reagent (ASR) (or similar classification), and kits (particularly kits for clinical diagnostic use) containing reagents for detecting a SNP disclosed herein can be classified by the FDA (or other agency) as in vitro diagnostic (IVD) kits or laboratory developed tests (LDTs) (or similar classifications), including in vitro diagnostic multivariate index assays (IVDMIAs). Furthermore, reagents and kits can be classified by the FDA (or other agency) as Class I, Class II, or Class III medical devices. Reagents and kits can also be registered with (e.g., approved by) and/or manufactured in compliance with regulatory requirements set forth by the Clinical Laboratory Improvement Amendments Act (CLIA), which is administered by the Centers for Medicare and Medicaid Services (CMS), or other agencies in the United States or throughout the rest of the world.

[0115] Reports, Programmed Computers, Business Methods, and Systems

[0116] The results of a test (e.g., an individual's predicted responsiveness to statin treatment, or an individual's risk for developing VT, based on assaying one or more SNPs disclosed herein, and/or an individual's allele(s)/genotype at one or more SNPs disclosed herein, etc.), and/or any other information pertaining to a test, may be referred to herein as a “report”. A tangible report can optionally be generated as part of a testing process (which may be interchangeably referred to herein as “reporting”, or as “providing” a report, “producing” a report, or “generating” a report).

[0117] Examples of tangible reports may include, but are not limited to, reports in paper (such as computer-generated printouts of test results) or equivalent formats and reports stored on computer readable medium (such as a CD, USB flash drive or other removable storage device, computer hard drive, or computer network server, etc.). Reports, particularly those stored on computer readable medium, can be part of a database, which may optionally be accessible via the internet (such as a database of patient records or genetic information stored on a computer network server, which may be a “secure database” that has security features that limit access to the report, such as to allow only the patient and the patient's medical practioners to view the report while preventing other unauthorized individuals from viewing the report, for example). In addition to, or as an alternative to, generating a tangible report, reports can also be displayed on a computer screen (or the display of another electronic device or instrument).

[0118] A report can include, for example, an individual's predicted risk for developing DVT and/or predicted responsiveness to statin treatment (e.g., whether the individual will benefit from statin treatment by having their risk for VT reduced), or may just include the allele(s)/genotype that an individual carries at one or more SNPs disclosed herein, which may optionally be linked to information regarding the significance of having the allele(s)/genotype at the SNP (for example, a report on computer readable medium such as a network server may include hyperlink(s) to one or more journal publications or websites that describe the medical/biological implications, such as statin response and/or VT risk, for individuals having a certain allele/genotype at the SNP). Thus, for example, the report can include drug responsiveness, disease risk, and/or other medical/biological significance, as well as optionally also including the allele/genotype information, or the report may just include allele/genotype information without including drug responsiveness, disease risk, or other medical/biological significance (such that an individual viewing the report can use the allele/genotype information to determine the associated drug response, disease risk, or other medical/biological significance from a source outside of the report itself, such as from a medical practioner, publication, website, etc., which may optionally be linked to the report such as by a hyperlink).

[0119] A report can further be “transmitted” or “communicated” (these terms may be used herein interchangeably), such as to the individual who was tested, a medical practitioner (e.g., a doctor, nurse, clinical laboratory practitioner, genetic counselor, etc.), a healthcare organization, a clinical laboratory, and/or any other party or requester intended to view or possess the report. The act of “transmitting” or “communicating” a report can be by any means known in the art, based on the format of the report. Furthermore, “transmitting” or “communicating” a report can include delivering/sending a report (“pushing”) and/or retrieving (“pulling”) a report. For example, reports can be transmitted/communicated by various means, including being physically transferred between parties (such as for reports in paper format) such as by being physically delivered from one party to another, or by being transmitted electronically (e.g., via e-mail or over the internet, by facsimile, and/or by any wired or wireless communication methods known in the art) such as by being retrieved from a database stored on a computer network server, etc.

[0120] In certain exemplary embodiments, the invention provides computers (or other apparatus/devices such as biomedical devices or laboratory instrumentation) programmed to carry out the methods described herein. For example, in certain embodiments, the invention provides a computer programmed to receive (i.e., as input) the identity (e.g., the allele(s) or genotype at a SNP) of one or more SNPs disclosed herein and provide (i.e., as output) the disease risk (e.g., an individual's predicted statin responsiveness or risk for developing VT) or other result based on the identity of the SNP(s). Such output (e.g., communication of disease risk, disease diagnosis or prognosis, drug responsiveness, etc.) may be, for example, in the form of a report on computer readable medium, printed in paper form, and/or displayed on a computer screen or other display. In various exemplary embodiments, the invention further provides methods of doing business (with respect to methods of doing business, the terms “individual” and “customer” are used herein interchangeably). For example, exemplary methods of doing business can comprise assaying one or more SNPs disclosed herein and providing a report that includes, for example, a customer's predicted response to statin treatment (e.g., for reducing their risk for VT) or their risk for developing VT (based on which allele(s)/genotype is present at the assayed SNP(s)) and/or that includes the allele(s)/genotype at the assayed SNP(s) which may optionally be linked to information (e.g., journal publications, websites, etc.) pertaining to disease risk or other biological/medical significance such as by means of a hyperlink (the report may be provided, for example, on a computer network server or other computer readable medium that is internet-accessible, and the report may be included in a secure database that allows the customer to access their report while preventing other unauthorized individuals from viewing the report), and optionally transmitting the report. Customers (or another party who is associated with the customer, such as the customer's doctor, for example) can request/order (e.g., purchase) the test online via the internet (or by phone, mail order, at an outlet/store, etc.), for example, and a kit can be sent/delivered (or otherwise provided) to the customer (or another party on behalf of the customer, such as the customer's doctor, for example) for collection of a biological sample from the customer (e.g., a buccal swab for collecting buccal cells), and the customer (or a party who collects the customer's biological sample) can submit their biological samples for assaying (e.g., to a laboratory or party associated with the laboratory such as a party that accepts the customer samples on behalf of the laboratory, a party for whom the laboratory is under the control of (e.g., the laboratory carries out the assays by request of the party or under a contract with the party, for example), and/or a party that receives at least a portion of the customer's payment for the test). The report (e.g., results of the assay including, for example, the customer's disease risk and/or allele(s)/genotype at the assayed SNP(s)) may be provided to the customer by, for example, the laboratory that assays the SNP(s) or a party associated with the laboratory (e.g., a party that receives at least a portion of the customer's payment for the assay, or a party that requests the laboratory to carry out the assays or that contracts with the laboratory for the assays to be carried out) or a doctor or other medical practitioner who is associated with (e.g., employed by or having a consulting or contracting arrangement with) the laboratory or with a party associated with the laboratory, or the report may be provided to a third party (e.g., a doctor, genetic counselor, hospital, etc.) which optionally provides the report to the customer. In further embodiments, the customer may be a doctor or other medical practitioner, or a hospital, laboratory, medical insurance organization, or other medical organization that requests/orders (e.g., purchases) tests for the purposes of having other individuals (e.g., their patients or customers) assayed for one or more SNPs disclosed herein and optionally obtaining a report of the assay results.

[0121] In certain exemplary methods of doing business, a kit for collecting a biological sample (e.g., a buccal swab for collecting buccal cells, or other sample collection device) is provided to a medical practitioner (e.g., a physician) which the medical practitioner uses to obtain a sample (e.g., buccal cells, saliva, blood, etc.) from a patient, the sample is then sent to a laboratory (e.g., a CLIA-certified laboratory) or other facility that tests the sample for one or more SNPs disclosed herein (e.g., to determine the genotype of one or more SNPs disclosed herein, such as to determine the patient's predicted response to statin treatment for reducing their risk for VT, and/or their risk for developing VT), and the results of the test (e.g., the patient's genotype at one or more SNPs disclosed herein and/or the patient's predicted statin response or VT risk based on their SNP genotype) are provided back to the medical practitioner (and/or directly to the patient and/or to another party such as a hospital, medical insurance company, genetic counselor, etc.) who may then provide or otherwise convey the results to the patient. The results are typically provided in the form of a report, such as described above.

[0122] In certain further exemplary methods of doing business, kits for collecting a biological sample from a customer (e.g., a buccal swab for collecting buccal cells, or other sample collection device) are provided (e.g., for sale), such as at an outlet (e.g., a drug store, pharmacy, general merchandise store, or any other desirable outlet), online via the internet, by mail order, etc., whereby customers can obtain (e.g., purchase) the kits, collect their own biological samples, and submit (e.g., send/deliver via mail) their samples to a laboratory (e.g., a CLIA-certified laboratory) or other facility which tests the samples for one or more SNPs disclosed herein (e.g., to determine the genotype of one or more SNPs disclosed herein, such as to determine the customer's predicted response to statin treatment for reducing their risk for VT, and/or their risk for developing VT) and provides the results of the test (e.g., of the customer's genotype at one or more SNPs disclosed herein and/or the customer's statin response or VT risk based on their SNP genotype) back to the customer and/or to a third party (e.g., a physician or other medical practitioner, hospital, medical insurance company, genetic counselor, etc.). The results are typically provided in the form of a report, such as described above. If the results of the test are provided to a third party, then this third party may optionally provide another report to the customer based on the results of the test (e.g., the result of the test from the laboratory may provide the customer's genotype at one or more SNPs disclosed herein without statin response or VT risk information, and the third party may provide a report of the customer's statin response or VT risk based on this genotype result).

[0123] Certain further embodiments of the invention provide a system for determining whether an individual will benefit from statin treatment (or other therapy) in reducing VT risk, or for determining an individual's risk for developing VT. Certain exemplary systems comprise an integrated “loop” in which an individual (or their medical practitioner) requests a determination of such individual's predicted statin response (or VT risk, etc.), this determination is carried out by testing a sample from the individual, and then the results of this determination are provided back to the requestor. For example, in certain systems, a sample (e.g., buccal cells, saliva, blood, etc.) is obtained from an individual for testing (the sample may be obtained by the individual or, for example, by a medical practitioner), the sample is submitted to a laboratory (or other facility) for testing (e.g., determining the genotype of one or more SNPs disclosed herein), and then the results of the testing are sent to the patient (which optionally can be done by first sending the results to an intermediary, such as a medical practioner, who then provides or otherwise conveys the results to the individual and/or acts on the results), thereby forming an integrated loop system for determining an individual's predicted statin response (or VT risk, etc.). The portions of the system in which the results are transmitted (e.g., between any of a testing facility, a medical practitioner, and/or the individual) can be carried out by way of electronic transmission (e.g., by computer such as via e-mail or the internet, by providing the results on a website or computer network server which may optionally be a secure database, by phone or fax, or by any other wired or wireless transmission methods known in the art). Optionally, the system can further include a risk reduction component (i.e., a disease management system) as part of the integrated loop (for an example of a disease management system, see U.S. Pat. No. 6,770,029, “Disease management system and method including correlation assessment”). For example, the results of the test can be used to reduce the risk of the disease in the individual who was tested, such as by implementing a preventive therapy regimen (e.g., administration of a statin or other drug for reducing VT risk), modifying the individual's diet, increasing exercise, reducing stress, and/or implementing any other physiological or behavioral modifications in the individual with the goal of reducing disease risk. For reducing VT risk, this may include any means used in the art for improving aspects of an individual's health relevant to reducing VT risk. Thus, in exemplary embodiments, the system is controlled by the individual and/or their medical practioner in that the individual and/or their medical practioner requests the test, receives the test results back, and (optionally) acts on the test results to reduce the individual's disease risk, such as by implementing a disease management system.

[0124] Isolated Nucleic Acid Molecules and SNP Detection Reagents & Kits

[0125] Tables 1 and 2 provide a variety of information about each SNP of the present invention that is associated with risk for developing VT and/or response to statin treatment (particularly for reducing an individual's risk for VT), including the transcript sequences (SEQ ID NOS:1-84), genomic sequences (SEQ ID NOS:338-500), and protein sequences (SEQ ID NOS:85-168) of the encoded gene products (with the SNPs indicated by IUB codes in the nucleic acid sequences). In addition, Tables 1 and 2 include SNP context sequences, which generally include 100 nucleotide upstream (5′) plus 100 nucleotides downstream (3′) of each SNP position (SEQ ID NOS:169-337 correspond to transcript-based SNP context sequences disclosed in Table 1, and SEQ ID NOS:501-3098 correspond to genomic-based context sequences disclosed in Table 2), the alternative nucleotides (alleles) at each SNP position, and additional information about the variant where relevant, such as SNP type (coding, missense, splice site, UTR, etc.), human populations in which the SNP was observed, observed allele frequencies, information about the encoded protein, etc.

[0126] Isolated Nucleic Acid Molecules

[0127] Exemplary embodiments of the invention provide isolated nucleic acid molecules that contain one or more SNPs disclosed herein, particularly SNPs disclosed in Table 1 and/or Table 2. Isolated nucleic acid molecules containing one or more SNPs disclosed herein (such as in at least one of Tables 1 and 2) may be interchangeably referred to throughout the present text as “SNP-containing nucleic acid molecules.” Isolated nucleic acid molecules may optionally encode a full-length variant protein or fragment thereof. The isolated nucleic acid molecules of the present invention also include probes and primers (which are described in greater detail below in the section entitled “SNP Detection Reagents”), which may be used for assaying the disclosed SNPs, and isolated full-length genes, transcripts, cDNA molecules, and fragments thereof, which may be used for such purposes as expressing an encoded protein.

[0128] As used herein, an “isolated nucleic acid molecule” generally is one that contains a SNP of the present invention or one that hybridizes to such molecule such as a nucleic acid with a complementary sequence, and is separated from most other nucleic acids present in the natural source of the nucleic acid molecule. Moreover, an “isolated” nucleic acid molecule, such as a cDNA molecule containing a SNP of the present invention, can be substantially free of other cellular material, or culture medium when produced by recombinant techniques, or chemical precursors or other chemicals when chemically synthesized. A nucleic acid molecule can be fused to other coding or regulatory sequences and still be considered “isolated.” Nucleic acid molecules present in non-human transgenic animals, which do not naturally occur in the animal, are also considered “isolated.” For example, recombinant DNA molecules contained in a vector are considered “isolated.” Further examples of “isolated” DNA molecules include recombinant DNA molecules maintained in heterologous host cells, and purified (partially or substantially) DNA molecules in solution. Isolated RNA molecules include in vivo or in vitro RNA transcripts of the isolated SNP-containing DNA molecules of the present invention. Isolated nucleic acid molecules according to the present invention further include such molecules produced synthetically.

[0129] Generally, an isolated SNP-containing nucleic acid molecule comprises one or more SNP positions disclosed by the present invention with flanking nucleotide sequences on either side of the SNP positions. A flanking sequence can include nucleotide residues that are naturally associated with the SNP site and/or heterologous nucleotide sequences. Preferably, the flanking sequence is up to about 500, 300, 100, 60, 50, 30, 25, 20, 15, 10, 8, or 4 nucleotides (or any other length in-between) on either side of a SNP position, or as long as the full-length gene or entire protein-coding sequence (or any portion thereof such as an exon), especially if the SNP-containing nucleic acid molecule is to be used to produce a protein or protein fragment.

[0130] For full-length genes and entire protein-coding sequences, a SNP flanking sequence can be, for example, up to about 5 KB, 4 KB, 3 KB, 2 KB, 1 KB on either side of the SNP. Furthermore, in such instances the isolated nucleic acid molecule comprises exonic sequences (including protein-coding and/or non-coding exonic sequences), but may also include intronic sequences. Thus, any protein coding sequence may be either contiguous or separated by introns. The important point is that the nucleic acid is isolated from remote and unimportant flanking sequences and is of appropriate length such that it can be subjected to the specific manipulations or uses described herein such as recombinant protein expression, preparation of probes and primers for assaying the SNP position, and other uses specific to the SNP-containing nucleic acid sequences.

[0131] An isolated SNP-containing nucleic acid molecule can comprise, for example, a full-length gene or transcript, such as a gene isolated from genomic DNA (e.g., by cloning or PCR amplification), a cDNA molecule, or an mRNA transcript molecule. Polymorphic transcript sequences are referred to in Table 1 and provided in the Sequence Listing (SEQ ID NOS:1-84), and polymorphic genomic sequences are referred to in Table 2 and provided in the Sequence Listing (SEQ ID NOS:338-500). Furthermore, fragments of such full-length genes and transcripts that contain one or more SNPs disclosed herein are also encompassed by the present invention, and such fragments may be used, for example, to express any part of a protein, such as a particular functional domain or an antigenic epitope.

[0132] Thus, the present invention also encompasses fragments of the nucleic acid sequences as disclosed in Tables 1 and 2 (transcript sequences are referred to in Table 1 as SEQ ID NOS:1-84, genomic sequences are referred to in Table 2 as SEQ ID NOS:338-500, transcript-based SNP context sequences are referred to in Table 1 as SEQ ID NOS:169-337, and genomic-based SNP context sequences are referred to in Table 2 as SEQ ID NOS:501-3098) and their complements. The actual sequences referred to in the tables are provided in the Sequence Listing. A fragment typically comprises a contiguous nucleotide sequence at least about 8 or more nucleotides, more preferably at least about 12 or more nucleotides, and even more preferably at least about 16 or more nucleotides. Furthermore, a fragment could comprise at least about 18, 20, 22, 25, 30, 40, 50, 60, 80, 100, 150, 200, 250 or 500 nucleotides in length (or any other number in between). The length of the fragment will be based on its intended use. For example, the fragment can encode epitope-bearing regions of a variant peptide or regions of a variant peptide that differ from the normal/wild-type protein, or can be useful as a polynucleotide probe or primer. Such fragments can be isolated using the nucleotide sequences provided in Table 1 and/or Table 2 for the synthesis of a polynucleotide probe. A labeled probe can then be used, for example, to screen a cDNA library, genomic DNA library, or mRNA to isolate nucleic acid corresponding to the coding region. Further, primers can be used in amplification reactions, such as for purposes of assaying one or more SNPs sites or for cloning specific regions of a gene.

[0133] An isolated nucleic acid molecule of the present invention further encompasses a SNP-containing polynucleotide that is the product of any one of a variety of nucleic acid amplification methods, which are used to increase the copy numbers of a polynucleotide of interest in a nucleic acid sample. Such amplification methods are well known in the art, and they include but are not limited to, polymerase chain reaction (PCR) (U.S. Pat. Nos. 4,683,195 and 4,683,202; PCR Technology: Principles and Applications for DNA Amplification, ed. H. A. Erlich, Freeman Press, NY, N.Y. (1992)), ligase chain reaction (LCR) (Wu and Wallace, Genomics 4:560 (1989); Landegren et al., Science 241:1077 (1988)), strand displacement amplification (SDA) (U.S. Pat. Nos. 5,270,184 and 5,422,252), transcription-mediated amplification (TMA) (U.S. Pat. No. 5,399,491), linked linear amplification (LLA) (U.S. Pat. No. 6,027,923) and the like, and isothermal amplification methods such as nucleic acid sequence based amplification (NASBA) and self-sustained sequence replication (Guatelli et al., Proc Natl Acad Sci USA 87:1874 (1990)). Based on such methodologies, a person skilled in the art can readily design primers in any suitable regions 5′ and 3′ to a SNP disclosed herein. Such primers may be used to amplify DNA of any length so long that it contains the SNP of interest in its sequence.

[0134] As used herein, an “amplified polynucleotide” of the invention is a SNP-containing nucleic acid molecule whose amount has been increased at least two fold by any nucleic acid amplification method performed in vitro as compared to its starting amount in a test sample. In other preferred embodiments, an amplified polynucleotide is the result of at least ten fold, fifty fold, one hundred fold, one thousand fold, or even ten thousand fold increase as compared to its starting amount in a test sample. In a typical PCR amplification, a polynucleotide of interest is often amplified at least fifty thousand fold in amount over the unamplified genomic DNA, but the precise amount of amplification needed for an assay depends on the sensitivity of the subsequent detection method used.

[0135] Generally, an amplified polynucleotide is at least about 16 nucleotides in length. More typically, an amplified polynucleotide is at least about 20 nucleotides in length. In a preferred embodiment of the invention, an amplified polynucleotide is at least about 30 nucleotides in length.

[0136] In a more preferred embodiment of the invention, an amplified polynucleotide is at least about 32, 40, 45, 50, or 60 nucleotides in length. In yet another preferred embodiment of the invention, an amplified polynucleotide is at least about 100, 200, 300, 400, or 500 nucleotides in length. While the total length of an amplified polynucleotide of the invention can be as long as an exon, an intron or the entire gene where the SNP of interest resides, an amplified product is typically up to about 1,000 nucleotides in length (although certain amplification methods may generate amplified products greater than 1000 nucleotides in length). More preferably, an amplified polynucleotide is not greater than about 600-700 nucleotides in length. It is understood that irrespective of the length of an amplified polynucleotide, a SNP of interest may be located anywhere along its sequence.

[0137] In a specific embodiment of the invention, the amplified product is at least about 201 nucleotides in length, comprises one of the transcript-based context sequences or the genomic-based context sequences shown in Tables 1 and 2. Such a product may have additional sequences on its 5′ end or 3′ end or both. In another embodiment, the amplified product is about 101 nucleotides in length, and it contains a SNP disclosed herein. Preferably, the SNP is located at the middle of the amplified product (e.g., at position 101 in an amplified product that is 201 nucleotides in length, or at position 51 in an amplified product that is 101 nucleotides in length), or within 1, 2, 3, 4, 5, 6, 7, 8, 9, 10, 12, 15, or 20 nucleotides from the middle of the amplified product. However, as indicated above, the SNP of interest may be located anywhere along the length of the amplified product.

[0138] The present invention provides isolated nucleic acid molecules that comprise, consist of, or consist essentially of one or more polynucleotide sequences that contain one or more SNPs disclosed herein, complements thereof, and SNP-containing fragments thereof. Accordingly, the present invention provides nucleic acid molecules that consist of any of the nucleotide sequences shown in Table 1 and/or Table 2 (transcript sequences are referred to in Table 1 as SEQ ID NOS:1-84, genomic sequences are referred to in Table 2 as SEQ ID NOS:338-500, transcript-based SNP context sequences are referred to in Table 1 as SEQ ID NOS:169-337, and genomic-based SNP context sequences are referred to in Table 2 as SEQ ID NOS:501-3098), or any nucleic acid molecule that encodes any of the variant proteins referred to in Table 1 (SEQ ID NOS:85-168). The actual sequences referred to in the tables are provided in the Sequence Listing. A nucleic acid molecule consists of a nucleotide sequence when the nucleotide sequence is the complete nucleotide sequence of the nucleic acid molecule.

[0139] The present invention further provides nucleic acid molecules that consist essentially of any of the nucleotide sequences referred to in Table 1 and/or Table 2 (transcript sequences are referred to in Table 1 as SEQ ID NOS:1-84, genomic sequences are referred to in Table 2 as SEQ ID NOS:338-500, transcript-based SNP context sequences are referred to in Table 1 as SEQ ID NOS:169-337, and genomic-based SNP context sequences are referred to in Table 2 as SEQ ID NOS:501-3098), or any nucleic acid molecule that encodes any of the variant proteins referred to in Table 1 (SEQ ID NOS:85-168). The actual sequences referred to in the tables are provided in the Sequence Listing. A nucleic acid molecule consists essentially of a nucleotide sequence when such a nucleotide sequence is present with only a few additional nucleotide residues in the final nucleic acid molecule.

[0140] The present invention further provides nucleic acid molecules that comprise any of the nucleotide sequences shown in Table 1 and/or Table 2 or a SNP-containing fragment thereof (transcript sequences are referred to in Table 1 as SEQ ID NOS:1-84, genomic sequences are referred to in Table 2 as SEQ ID NOS:338-500, transcript-based SNP context sequences are referred to in Table 1 as SEQ ID NOS:169-337, and genomic-based SNP context sequences are referred to in Table 2 as SEQ ID NOS:501-3098), or any nucleic acid molecule that encodes any of the variant proteins provided in Table 1 (SEQ ID NOS:85-168). The actual sequences referred to in the tables are provided in the Sequence Listing. A nucleic acid molecule comprises a nucleotide sequence when the nucleotide sequence is at least part of the final nucleotide sequence of the nucleic acid molecule. In such a fashion, the nucleic acid molecule can be only the nucleotide sequence or have additional nucleotide residues, such as residues that are naturally associated with it or heterologous nucleotide sequences. Such a nucleic acid molecule can have one to a few additional nucleotides or can comprise many more additional nucleotides. A brief description of how various types of these nucleic acid molecules can be readily made and isolated is provided below, and such techniques are well known to those of ordinary skill in the art. Sambrook and Russell, Molecular Cloning: A Laboratory Manual, Cold Spring Harbor Press, N.Y. (2000).

[0141] The isolated nucleic acid molecules can encode mature proteins plus additional amino or carboxyl-terminal amino acids or both, or amino acids interior to the mature peptide (when the mature form has more than one peptide chain, for instance). Such sequences may play a role in processing of a protein from precursor to a mature form, facilitate protein trafficking, prolong or shorten protein half-life, or facilitate manipulation of a protein for assay or production. As generally is the case in situ, the additional amino acids may be processed away from the mature protein by cellular enzymes.

[0142] Thus, the isolated nucleic acid molecules include, but are not limited to, nucleic acid molecules having a sequence encoding a peptide alone, a sequence encoding a mature peptide and additional coding sequences such as a leader or secretory sequence (e.g., a pre-pro or pro-protein sequence), a sequence encoding a mature peptide with or without additional coding sequences, plus additional non-coding sequences, for example introns and non-coding 5′ and 3′ sequences such as transcribed but untranslated sequences that play a role in, for example, transcription, mRNA processing (including splicing and polyadenylation signals), ribosome binding, and/or stability of mRNA. In addition, the nucleic acid molecules may be fused to heterologous marker sequences encoding, for example, a peptide that facilitates purification.

[0143] Isolated nucleic acid molecules can be in the form of RNA, such as mRNA, or in the form DNA, including cDNA and genomic DNA, which may be obtained, for example, by molecular cloning or produced by chemical synthetic techniques or by a combination thereof. Sambrook and Russell, Molecular Cloning: A Laboratory Manual, Cold Spring Harbor Press, N.Y. (2000). Furthermore, isolated nucleic acid molecules, particularly SNP detection reagents such as probes and primers, can also be partially or completely in the form of one or more types of nucleic acid analogs, such as peptide nucleic acid (PNA). U.S. Pat. Nos. 5,539,082; 5,527,675; 5,623,049; and 5,714,331. The nucleic acid, especially DNA, can be double-stranded or single-stranded. Single-stranded nucleic acid can be the coding strand (sense strand) or the complementary non-coding strand (anti-sense strand). DNA, RNA, or PNA segments can be assembled, for example, from fragments of the human genome (in the case of DNA or RNA) or single nucleotides, short oligonucleotide linkers, or from a series of oligonucleotides, to provide a synthetic nucleic acid molecule. Nucleic acid molecules can be readily synthesized using the sequences provided herein as a reference; oligonucleotide and PNA oligomer synthesis techniques are well known in the art. See, e.g., Corey, “Peptide nucleic acids: expanding the scope of nucleic acid recognition,” Trends Biotechnol 15(6):224-9 (June 1997), and Hyrup et al., “Peptide nucleic acids (PNA): synthesis, properties and potential applications,” Bioorg Med Chem 4(1):5-23) (January 1996). Furthermore, large-scale automated oligonucleotide/PNA synthesis (including synthesis on an array or bead surface or other solid support) can readily be accomplished using commercially available nucleic acid synthesizers, such as the Applied Biosystems (Foster City, Calif.) 3900 High-Throughput DNA Synthesizer or Expedite 8909 Nucleic Acid Synthesis System, and the sequence information provided herein.

[0144] The present invention encompasses nucleic acid analogs that contain modified, synthetic, or non-naturally occurring nucleotides or structural elements or other alternative/modified nucleic acid chemistries known in the art. Such nucleic acid analogs are useful, for example, as detection reagents (e.g., primers/probes) for detecting one or more SNPs identified in Table 1 and/or Table 2. Furthermore, kits/systems (such as beads, arrays, etc.) that include these analogs are also encompassed by the present invention. For example, PNA oligomers that are based on the polymorphic sequences of the present invention are specifically contemplated. PNA oligomers are analogs of DNA in which the phosphate backbone is replaced with a peptide-like backbone. Lagriffoul et al., Bioorganic & Medicinal Chemistry Letters 4:1081-1082 (1994); Petersen et al., Bioorganic & Medicinal Chemistry Letters 6:793-796 (1996); Kumar et al., Organic Letters 3(9):1269-1272 (2001); WO 96/04000. PNA hybridizes to complementary RNA or DNA with higher affinity and specificity than conventional oligonucleotides and oligonucleotide analogs. The properties of PNA enable novel molecular biology and biochemistry applications unachievable with traditional oligonucleotides and peptides.

[0145] Additional examples of nucleic acid modifications that improve the binding properties and/or stability of a nucleic acid include the use of base analogs such as inosine, intercalators (U.S. Pat. No. 4,835,263) and the minor groove binders (U.S. Pat. No. 5,801,115). Thus, references herein to nucleic acid molecules, SNP-containing nucleic acid molecules, SNP detection reagents (e.g., probes and primers), oligonucleotides/polynucleotides include PNA oligomers and other nucleic acid analogs. Other examples of nucleic acid analogs and alternative/modified nucleic acid chemistries known in the art are described in Current Protocols in Nucleic Acid Chemistry, John Wiley & Sons, N.Y. (2002).

[0146] The present invention further provides nucleic acid molecules that encode fragments of the variant polypeptides disclosed herein as well as nucleic acid molecules that encode obvious variants of such variant polypeptides. Such nucleic acid molecules may be naturally occurring, such as paralogs (different locus) and orthologs (different organism), or may be constructed by recombinant DNA methods or by chemical synthesis. Non-naturally occurring variants may be made by mutagenesis techniques, including those applied to nucleic acid molecules, cells, or organisms. Accordingly, the variants can contain nucleotide substitutions, deletions, inversions and insertions (in addition to the SNPs disclosed in Tables 1 and 2). Variation can occur in either or both the coding and non-coding regions. The variations can produce conservative and/or non-conservative amino acid substitutions.

[0147] Further variants of the nucleic acid molecules disclosed in Tables 1 and 2, such as naturally occurring allelic variants (as well as orthologs and paralogs) and synthetic variants produced by mutagenesis techniques, can be identified and/or produced using methods well known in the art. Such further variants can comprise a nucleotide sequence that shares at least 70-80%, 80-85%, 85-90%, 91%, 92%, 93%, 94%, 95%, 96%, 97%, 98%, or 99% sequence identity with a nucleic acid sequence disclosed in Table 1 and/or Table 2 (or a fragment thereof) and that includes a novel SNP allele disclosed in Table 1 and/or Table 2. Further, variants can comprise a nucleotide sequence that encodes a polypeptide that shares at least 70-80%, 80-85%, 85-90%, 91%, 92%, 93%, 94%, 95%, 96%, 97%, 98%, or 99% sequence identity with a polypeptide sequence disclosed in Table 1 (or a fragment thereof) and that includes a novel SNP allele disclosed in Table 1 and/or Table 2. Thus, an aspect of the present invention that is specifically contemplated are isolated nucleic acid molecules that have a certain degree of sequence variation compared with the sequences shown in Tables 1-2, but that contain a novel SNP allele disclosed herein. In other words, as long as an isolated nucleic acid molecule contains a novel SNP allele disclosed herein, other portions of the nucleic acid molecule that flank the novel SNP allele can vary to some degree from the specific transcript, genomic, and context sequences referred to and shown in Tables 1 and 2, and can encode a polypeptide that varies to some degree from the specific polypeptide sequences referred to in Table 1.

[0148] To determine the percent identity of two amino acid sequences or two nucleotide sequences of two molecules that share sequence homology, the sequences are aligned for optimal comparison purposes (e.g., gaps can be introduced in one or both of a first and a second amino acid or nucleic acid sequence for optimal alignment and non-homologous sequences can be disregarded for comparison purposes). In a preferred embodiment, at least 30%, 40%, 50%, 60%, 70%, 80%, or 90% or more of the length of a reference sequence is aligned for comparison purposes. The amino acid residues or nucleotides at corresponding amino acid positions or nucleotide positions are then compared. When a position in the first sequence is occupied by the same amino acid residue or nucleotide as the corresponding position in the second sequence, then the molecules are identical at that position (as used herein, amino acid or nucleic acid “identity” is equivalent to amino acid or nucleic acid “homology”). The percent identity between the two sequences is a function of the number of identical positions shared by the sequences, taking into account the number of gaps, and the length of each gap, which need to be introduced for optimal alignment of the two sequences.

[0149] The comparison of sequences and determination of percent identity between two sequences can be accomplished using a mathematical algorithm. Computational Molecular Biology, A. M. Lesk, ed., Oxford University Press, N.Y. (1988); Biocomputing: Informatics and Genome Projects, D. W. Smith, ed., Academic Press, N.Y. (1993); Computer Analysis of Sequence Data, Part 1, A. M. Griffin and H. G. Griffin, eds., Humana Press, N.J. (1994); Sequence Analysis in Molecular Biology, G. von Heinje, ed., Academic Press, N.Y. (1987); and Sequence Analysis Primer, M. Gribskov and J. Devereux, eds., M. Stockton Press, N.Y. (1991). In a preferred embodiment, the percent identity between two amino acid sequences is determined using the Needleman and Wunsch algorithm (J Mol Biol (48):444-453 (1970)) which has been incorporated into the GAP program in the GCG software package, using either a Blossom 62 matrix or a PAM250 matrix, and a gap weight of 16, 14, 12, 10, 8, 6, or 4 and a length weight of 1, 2, 3, 4, 5, or 6.

[0150] In yet another preferred embodiment, the percent identity between two nucleotide sequences is determined using the GAP program in the GCG software package using a NWSgapdna.CMP matrix and a gap weight of 40, 50, 60, 70, or 80 and a length weight of 1, 2, 3, 4, 5, or 6. J. Devereux et al., Nucleic Acids Res. 12(1):387 (1984). In another embodiment, the percent identity between two amino acid or nucleotide sequences is determined using the algorithm of E. Myers and W. Miller (CABIOS 4:11-17 (1989)) which has been incorporated into the ALIGN program (version 2.0), using a PAM120 weight residue table, a gap length penalty of 12, and a gap penalty of 4.

[0151] The nucleotide and amino acid sequences of the present invention can further be used as a “query sequence” to perform a search against sequence databases; for example, to identify other family members or related sequences. Such searches can be performed using the NBLAST and XBLAST programs (version 2.0). Altschul et al., J Mol Biol 215:403-10 (1990). BLAST nucleotide searches can be performed with the NBLAST program, score=100, wordlength=12 to obtain nucleotide sequences homologous to the nucleic acid molecules of the invention. BLAST protein searches can be performed with the XBLAST program, score=50, wordlength=3 to obtain amino acid sequences homologous to the proteins of the invention. To obtain gapped alignments for comparison purposes, Gapped BLAST can be utilized. Altschul et al., Nucleic Acids Res 25(17):3389-3402 (1997). When utilizing BLAST and gapped BLAST programs, the default parameters of the respective programs (e.g., XBLAST and NBLAST) can be used. In addition to BLAST, examples of other search and sequence comparison programs used in the art include, but are not limited to, FASTA (Pearson, Methods Mol Biol 25, 365-389 (1994)) and KERR (Dufresne et al., Nat Biotechnol 20(12):1269-71 (December 2002)). For further information regarding bioinformatics techniques, see Current Protocols in Bioinformatics, John Wiley & Sons, Inc., N.Y.

[0152] The present invention further provides non-coding fragments of the nucleic acid molecules disclosed in Table 1 and/or Table 2. Preferred non-coding fragments include, but are not limited to, promoter sequences, enhancer sequences, intronic sequences, 5′ untranslated regions (UTRs), 3′ untranslated regions, gene modulating sequences and gene termination sequences. Such fragments are useful, for example, in controlling heterologous gene expression and in developing screens to identify gene-modulating agents.

[0153] SNP Detection Reagents

[0154] In a specific aspect of the present invention, the SNPs disclosed in Table 1 and/or Table 2, and their associated transcript sequences (referred to in Table 1 as SEQ ID NOS:1-84), genomic sequences (referred to in Table 2 as SEQ ID NOS:338-500), and context sequences (transcript-based context sequences are referred to in Table 1 as SEQ ID NOS:169-337; genomic-based context sequences are provided in Table 2 as SEQ ID NOS:501-3098), can be used for the design of SNP detection reagents. The actual sequences referred to in the tables are provided in the Sequence Listing. As used herein, a “SNP detection reagent” is a reagent that specifically detects a specific target SNP position disclosed herein, and that is preferably specific for a particular nucleotide (allele) of the target SNP position (i.e., the detection reagent preferably can differentiate between different alternative nucleotides at a target SNP position, thereby allowing the identity of the nucleotide present at the target SNP position to be determined). Typically, such detection reagent hybridizes to a target SNP-containing nucleic acid molecule by complementary base-pairing in a sequence specific manner, and discriminates the target variant sequence from other nucleic acid sequences such as an art-known form in a test sample. An example of a detection reagent is a probe that hybridizes to a target nucleic acid containing one or more of the SNPs referred to in Table 1 and/or Table 2. In a preferred embodiment, such a probe can differentiate between nucleic acids having a particular nucleotide (allele) at a target SNP position from other nucleic acids that have a different nucleotide at the same target SNP position. In addition, a detection reagent may hybridize to a specific region 5′ and/or 3′ to a SNP position, particularly a region corresponding to the context sequences referred to in Table 1 and/or Table 2 (transcript-based context sequences are referred to in Table 1 as SEQ ID NOS:169-337; genomic-based context sequences are referred to in Table 2 as SEQ ID NOS:501-3098). Another example of a detection reagent is a primer that acts as an initiation point of nucleotide extension along a complementary strand of a target polynucleotide. The SNP sequence information provided herein is also useful for designing primers, e.g. allele-specific primers, to amplify (e.g., using PCR) any SNP of the present invention.

[0155] In one preferred embodiment of the invention, a SNP detection reagent is an isolated or synthetic DNA or RNA polynucleotide probe or primer or PNA oligomer, or a combination of DNA, RNA and/or PNA, that hybridizes to a segment of a target nucleic acid molecule containing a SNP identified in Table 1 and/or Table 2. A detection reagent in the form of a polynucleotide may optionally contain modified base analogs, intercalators or minor groove binders. Multiple detection reagents such as probes may be, for example, affixed to a solid support (e.g., arrays or beads) or supplied in solution (e.g. probe/primer sets for enzymatic reactions such as PCR, RT-PCR, TaqMan assays, or primer-extension reactions) to form a SNP detection kit.

[0156] A probe or primer typically is a substantially purified oligonucleotide or PNA oligomer. Such oligonucleotide typically comprises a region of complementary nucleotide sequence that hybridizes under stringent conditions to at least about 8, 10, 12, 16, 18, 20, 22, 25, 30, 40, 50, 55, 60, 65, 70, 80, 90, 100, 120 (or any other number in-between) or more consecutive nucleotides in a target nucleic acid molecule. Depending on the particular assay, the consecutive nucleotides can either include the target SNP position, or be a specific region in close enough proximity 5′ and/or 3′ to the SNP position to carry out the desired assay.

[0157] Other preferred primer and probe sequences can readily be determined using the transcript sequences (SEQ ID NOS:1-84), genomic sequences (SEQ ID NOS:338-500), and SNP context sequences (transcript-based context sequences are referred to in Table 1 as SEQ ID NOS:169-337; genomic-based context sequences are referred to in Table 2 as SEQ ID NOS:501-3098) disclosed in the Sequence Listing and in Tables 1 and 2. The actual sequences referred to in the tables are provided in the Sequence Listing. It will be apparent to one of skill in the art that such primers and probes are directly useful as reagents for genotyping the SNPs of the present invention, and can be incorporated into any kit/system format.

[0158] In order to produce a probe or primer specific for a target SNP-containing sequence, the gene/transcript and/or context sequence surrounding the SNP of interest is typically examined using a computer algorithm that starts at the 5′ or at the 3′ end of the nucleotide sequence. Typical algorithms will then identify oligomers of defined length that are unique to the gene/SNP context sequence, have a GC content within a range suitable for hybridization, lack predicted secondary structure that may interfere with hybridization, and/or possess other desired characteristics or that lack other undesired characteristics.

[0159] A primer or probe of the present invention is typically at least about 8 nucleotides in length. In one embodiment of the invention, a primer or a probe is at least about 10 nucleotides in length. In a preferred embodiment, a primer or a probe is at least about 12 nucleotides in length. In a more preferred embodiment, a primer or probe is at least about 16, 17, 18, 19, 20, 21, 22, 23, 24 or 25 nucleotides in length. While the maximal length of a probe can be as long as the target sequence to be detected, depending on the type of assay in which it is employed, it is typically less than about 50, 60, 65, or 70 nucleotides in length. In the case of a primer, it is typically less than about 30 nucleotides in length. In a specific preferred embodiment of the invention, a primer or a probe is within the length of about 18 and about 28 nucleotides. However, in other embodiments, such as nucleic acid arrays and other embodiments in which probes are affixed to a substrate, the probes can be longer, such as on the order of 30-70, 75, 80, 90, 100, or more nucleotides in length (see the section below entitled “SNP Detection Kits and Systems”).

[0160] For analyzing SNPs, it may be appropriate to use oligonucleotides specific for alternative SNP alleles. Such oligonucleotides that detect single nucleotide variations in target sequences may be referred to by such terms as “allele-specific oligonucleotides,” “allele-specific probes,” or “allele-specific primers.” The design and use of allele-specific probes for analyzing polymorphisms is described in, e.g., Mutation Detection: A Practical Approach, Cotton et al., eds., Oxford University Press (1998); Saiki et al., Nature 324:163-166 (1986); Dattagupta, EP235,726; and Saiki, WO 89/11548.

[0161] While the design of each allele-specific primer or probe depends on variables such as the precise composition of the nucleotide sequences flanking a SNP position in a target nucleic acid molecule, and the length of the primer or probe, another factor in the use of primers and probes is the stringency of the condition under which the hybridization between the probe or primer and the target sequence is performed. Higher stringency conditions utilize buffers with lower ionic strength and/or a higher reaction temperature, and tend to require a more perfect match between probe/primer and a target sequence in order to form a stable duplex. If the stringency is too high, however, hybridization may not occur at all. In contrast, lower stringency conditions utilize buffers with higher ionic strength and/or a lower reaction temperature, and permit the formation of stable duplexes with more mismatched bases between a probe/primer and a target sequence. By way of example and not limitation, exemplary conditions for high stringency hybridization conditions using an allele-specific probe are as follows: prehybridization with a solution containing 5× standard saline phosphate EDTA (SSPE), 0.5% NaDodSO₄ (SDS) at 55° C., and incubating probe with target nucleic acid molecules in the same solution at the same temperature, followed by washing with a solution containing 2×SSPE, and 0.1% SDS at 55° C. or room temperature.

[0162] Moderate stringency hybridization conditions may be used for allele-specific primer extension reactions with a solution containing, e.g., about 50 mM KCl at about 46° C. Alternatively, the reaction may be carried out at an elevated temperature such as 60° C. In another embodiment, a moderately stringent hybridization condition suitable for oligonucleotide ligation assay (OLA) reactions wherein two probes are ligated if they are completely complementary to the target sequence may utilize a solution of about 100 mM KCl at a temperature of 46° C.

[0163] In a hybridization-based assay, allele-specific probes can be designed that hybridize to a segment of target DNA from one individual but do not hybridize to the corresponding segment from another individual due to the presence of different polymorphic forms (e.g., alternative SNP alleles/nucleotides) in the respective DNA segments from the two individuals. Hybridization conditions should be sufficiently stringent that there is a significant detectable difference in hybridization intensity between alleles, and preferably an essentially binary response, whereby a probe hybridizes to only one of the alleles or significantly more strongly to one allele. While a probe may be designed to hybridize to a target sequence that contains a SNP site such that the SNP site aligns anywhere along the sequence of the probe, the probe is preferably designed to hybridize to a segment of the target sequence such that the SNP site aligns with a central position of the probe (e.g., a position within the probe that is at least three nucleotides from either end of the probe). This design of probe generally achieves good discrimination in hybridization between different allelic forms.

[0164] In another embodiment, a probe or primer may be designed to hybridize to a segment of target DNA such that the SNP aligns with either the 5′ most end or the 3′ most end of the probe or primer. In a specific preferred embodiment that is particularly suitable for use in a oligonucleotide ligation assay (U.S. Pat. No. 4,988,617), the 3′ most nucleotide of the probe aligns with the SNP position in the target sequence.

[0165] Oligonucleotide probes and primers may be prepared by methods well known in the art. Chemical synthetic methods include, but are not limited to, the phosphotriester method described by Narang et al., Methods in Enzymology 68:90 (1979); the phosphodiester method described by Brown et al., Methods in Enzymology 68:109 (1979); the diethylphosphoamidate method described by Beaucage et al., Tetrahedron Letters 22:1859 (1981); and the solid support method described in U.S. Pat. No. 4,458,066.

[0166] Allele-specific probes are often used in pairs (or, less commonly, in sets of 3 or 4, such as if a SNP position is known to have 3 or 4 alleles, respectively, or to assay both strands of a nucleic acid molecule for a target SNP allele), and such pairs may be identical except for a one nucleotide mismatch that represents the allelic variants at the SNP position. Commonly, one member of a pair perfectly matches a reference form of a target sequence that has a more common SNP allele (i.e., the allele that is more frequent in the target population) and the other member of the pair perfectly matches a form of the target sequence that has a less common SNP allele (i.e., the allele that is rarer in the target population). In the case of an array, multiple pairs of probes can be immobilized on the same support for simultaneous analysis of multiple different polymorphisms.

[0167] In one type of PCR-based assay, an allele-specific primer hybridizes to a region on a target nucleic acid molecule that overlaps a SNP position and only primes amplification of an allelic form to which the primer exhibits perfect complementarity. Gibbs, Nucleic Acid Res 17:2427-2448 (1989). Typically, the primer's 3′-most nucleotide is aligned with and complementary to the SNP position of the target nucleic acid molecule. This primer is used in conjunction with a second primer that hybridizes at a distal site. Amplification proceeds from the two primers, producing a detectable product that indicates which allelic form is present in the test sample. A control is usually performed with a second pair of primers, one of which shows a single base mismatch at the polymorphic site and the other of which exhibits perfect complementarity to a distal site. The single-base mismatch prevents amplification or substantially reduces amplification efficiency, so that either no detectable product is formed or it is formed in lower amounts or at a slower pace. The method generally works most effectively when the mismatch is at the 3′-most position of the oligonucleotide (i.e., the 3′-most position of the oligonucleotide aligns with the target SNP position) because this position is most destabilizing to elongation from the primer (see, e.g., WO 93/22456). This PCR-based assay can be utilized as part of the TaqMan assay, described below.

[0168] In a specific embodiment of the invention, a primer of the invention contains a sequence substantially complementary to a segment of a target SNP-containing nucleic acid molecule except that the primer has a mismatched nucleotide in one of the three nucleotide positions at the 3′-most end of the primer, such that the mismatched nucleotide does not base pair with a particular allele at the SNP site.

[0169] In a preferred embodiment, the mismatched nucleotide in the primer is the second from the last nucleotide at the 3′-most position of the primer. In a more preferred embodiment, the mismatched nucleotide in the primer is the last nucleotide at the 3′-most position of the primer.

[0170] In another embodiment of the invention, a SNP detection reagent of the invention is labeled with a fluorogenic reporter dye that emits a detectable signal. While the preferred reporter dye is a fluorescent dye, any reporter dye that can be attached to a detection reagent such as an oligonucleotide probe or primer is suitable for use in the invention. Such dyes include, but are not limited to, Acridine, AMCA, BODIPY, Cascade Blue, Cy₂, Cy₃, Cy₅, Cy₇, Dabcyl, Edans, Eosin, Erythrosin, Fluorescein, 6-Fam, Tet, Joe, Hex, Oregon Green, Rhodamine, Rhodol Green, Tamra, Rox, and Texas Red.

[0171] In yet another embodiment of the invention, the detection reagent may be further labeled with a quencher dye such as Tamra, especially when the reagent is used as a self-quenching probe such as a TaqMan (U.S. Pat. Nos. 5,210,015 and 5,538,848) or Molecular Beacon probe (U.S. Pat. Nos. 5,118,801 and 5,312,728), or other stemless or linear beacon probe (Livak et al., PCR Method Appl 4:357-362 (1995); Tyagi et al., Nature Biotechnology 14:303-308 (1996); Nazarenko et al., Nucl Acids Res 25:2516-2521 (1997); U.S. Pat. Nos. 5,866,336 and 6,117,635.

[0172] The detection reagents of the invention may also contain other labels, including but not limited to, biotin for streptavidin binding, hapten for antibody binding, and oligonucleotide for binding to another complementary oligonucleotide such as pairs of zipcodes.

[0173] The present invention also contemplates reagents that do not contain (or that are complementary to) a SNP nucleotide identified herein but that are used to assay one or more SNPs disclosed herein. For example, primers that flank, but do not hybridize directly to a target SNP position provided herein are useful in primer extension reactions in which the primers hybridize to a region adjacent to the target SNP position (i.e., within one or more nucleotides from the target SNP site). During the primer extension reaction, a primer is typically not able to extend past a target SNP site if a particular nucleotide (allele) is present at that target SNP site, and the primer extension product can be detected in order to determine which SNP allele is present at the target SNP site. For example, particular ddNTPs are typically used in the primer extension reaction to terminate primer extension once a ddNTP is incorporated into the extension product (a primer extension product which includes a ddNTP at the 3′-most end of the primer extension product, and in which the ddNTP is a nucleotide of a SNP disclosed herein, is a composition that is specifically contemplated by the present invention). Thus, reagents that bind to a nucleic acid molecule in a region adjacent to a SNP site and that are used for assaying the SNP site, even though the bound sequences do not necessarily include the SNP site itself, are also contemplated by the present invention.

[0174] SNP Detection Kits and Systems

[0175] A person skilled in the art will recognize that, based on the SNP and associated sequence information disclosed herein, detection reagents can be developed and used to assay any SNP of the present invention individually or in combination, and such detection reagents can be readily incorporated into one of the established kit or system formats which are well known in the art. The terms “kits” and “systems,” as used herein in the context of SNP detection reagents, are intended to refer to such things as combinations of multiple SNP detection reagents, or one or more SNP detection reagents in combination with one or more other types of elements or components (e.g., other types of biochemical reagents, containers, packages such as packaging intended for commercial sale, substrates to which SNP detection reagents are attached, electronic hardware components, etc.). Accordingly, the present invention further provides SNP detection kits and systems, including but not limited to, packaged probe and primer sets (e.g. TaqMan probe/primer sets), arrays/microarrays of nucleic acid molecules, and beads that contain one or more probes, primers, or other detection reagents for detecting one or more SNPs of the present invention. The kits/systems can optionally include various electronic hardware components; for example, arrays (“DNA chips”) and microfluidic systems (“lab-on-a-chip” systems) provided by various manufacturers typically comprise hardware components. Other kits/systems (e.g., probe/primer sets) may not include electronic hardware components, but may be comprised of, for example, one or more SNP detection reagents (along with, optionally, other biochemical reagents) packaged in one or more containers.

[0176] In some embodiments, a SNP detection kit typically contains one or more detection reagents and other components (e.g. a buffer, enzymes such as DNA polymerases or ligases, chain extension nucleotides such as deoxynucleotide triphosphates, and in the case of Sanger-type DNA sequencing reactions, chain terminating nucleotides, positive control sequences, negative control sequences, and the like) necessary to carry out an assay or reaction, such as amplification and/or detection of a SNP-containing nucleic acid molecule. A kit may further contain means for determining the amount of a target nucleic acid, and means for comparing the amount with a standard, and can comprise instructions for using the kit to detect the SNP-containing nucleic acid molecule of interest. In one embodiment of the present invention, kits are provided which contain the necessary reagents to carry out one or more assays to detect one or more SNPs disclosed herein. In a preferred embodiment of the present invention, SNP detection kits/systems are in the form of nucleic acid arrays, or compartmentalized kits, including microfluidic/lab-on-a-chip systems.

[0177] Exemplary kits of the invention can comprise a container containing a SNP detection reagent which detects a SNP disclosed herein, said container can optionally be enclosed in a package (e.g., a box for commercial sale), and said package can further include other containers containing any or all of the following: enzyme (e.g., polymerase or ligase, any of which can be thermostable), dNTPs and/or ddNTPs (which can optionally be detectably labeled, such as with a fluorescent label or mass tag, and such label can optionally differ between any of the dATPs, dCTPs, dGTPs, dTTPs, ddATPs, ddCTPs, ddGTPs, and/or ddTTPs, so that each of these dNTPs and/or ddNTPs can be distinguished from each other by detection of the label, and any of these dNTPs and/or ddNTPs can optionally be stored in the same container or each in separate containers), buffer, controls (e.g., positive control nucleic acid, or a negative control), reagent(s) for extracting nucleic acid from a test sample, and instructions for using the kit (such as instructions for correlating the presence or absence of a particular allele or genotype with an increased or decreased risk for disease such as VT, or an increased or decreased likelihood of responding to a drug such as a statin). The SNP detection reagent can comprise, for example, at least one primer and/or probe, any of which can optionally be allele-specific, and any of which can optionally be detectably labeled (e.g., with a fluorescent label).

[0178] SNP detection kits/systems may contain, for example, one or more probes, or pairs of probes, that hybridize to a nucleic acid molecule at or near each target SNP position. Multiple pairs of allele-specific probes may be included in the kit/system to simultaneously assay large numbers of SNPs, at least one of which is a SNP of the present invention. In some kits/systems, the allele-specific probes are immobilized to a substrate such as an array or bead. For example, the same substrate can comprise allele-specific probes for detecting at least 1; 10; 100; 1000; 10,000; 100,000 (or any other number in-between) or substantially all of the SNPs shown in Table 1 and/or Table 2.

[0179] The terms “arrays,” “microarrays,” and “DNA chips” are used herein interchangeably to refer to an array of distinct polynucleotides affixed to a substrate, such as glass, plastic, paper, nylon or other type of membrane, filter, chip, or any other suitable solid support. The polynucleotides can be synthesized directly on the substrate, or synthesized separate from the substrate and then affixed to the substrate. In one embodiment, the microarray is prepared and used according to the methods described in Chee et al., U.S. Pat. No. 5,837,832 and PCT application WO95/11995; D. J. Lockhart et al., Nat Biotech 14:1675-1680 (1996); and M. Schena et al., Proc Natl Acad Sci 93:10614-10619 (1996), all of which are incorporated herein in their entirety by reference. In other embodiments, such arrays are produced by the methods described by Brown et al., U.S. Pat. No. 5,807,522.

[0180] Nucleic acid arrays are reviewed in the following references: Zammatteo et al., “New chips for molecular biology and diagnostics,” Biotechnol Annu Rev 8:85-101 (2002); Sosnowski et al., “Active microelectronic array system for DNA hybridization, genotyping and pharmacogenomic applications,” Psychiatr Genet. 12(4):181-92 (December 2002); Heller, “DNA microarray technology: devices, systems, and applications,” Annu Rev Biomed Eng 4:129-53 (2002); Epub Mar. 22, 2002; Kolchinsky et al., “Analysis of SNPs and other genomic variations using gel-based chips,” Hum Mutat 19(4):343-60 (April 2002); and McGall et al., “High-density genechip oligonucleotide probe arrays,” Adv Biochem Eng Biotechnol 77:21-42 (2002).

[0181] Any number of probes, such as allele-specific probes, may be implemented in an array, and each probe or pair of probes can hybridize to a different SNP position. In the case of polynucleotide probes, they can be synthesized at designated areas (or synthesized separately and then affixed to designated areas) on a substrate using a light-directed chemical process. Each DNA chip can contain, for example, thousands to millions of individual synthetic polynucleotide probes arranged in a grid-like pattern and miniaturized (e.g., to the size of a dime). Preferably, probes are attached to a solid support in an ordered, addressable array.

[0182] A microarray can be composed of a large number of unique, single-stranded polynucleotides, usually either synthetic antisense polynucleotides or fragments of cDNAs, fixed to a solid support. Typical polynucleotides are preferably about 6-60 nucleotides in length, more preferably about 15-30 nucleotides in length, and most preferably about 18-25 nucleotides in length. For certain types of microarrays or other detection kits/systems, it may be preferable to use oligonucleotides that are only about 7-20 nucleotides in length. In other types of arrays, such as arrays used in conjunction with chemiluminescent detection technology, preferred probe lengths can be, for example, about 15-80 nucleotides in length, preferably about 50-70 nucleotides in length, more preferably about 55-65 nucleotides in length, and most preferably about 60 nucleotides in length. The microarray or detection kit can contain polynucleotides that cover the known 5′ or 3′ sequence of a gene/transcript or target SNP site, sequential polynucleotides that cover the full-length sequence of a gene/transcript; or unique polynucleotides selected from particular areas along the length of a target gene/transcript sequence, particularly areas corresponding to one or more SNPs disclosed in Table 1 and/or Table 2. Polynucleotides used in the microarray or detection kit can be specific to a SNP or SNPs of interest (e.g., specific to a particular SNP allele at a target SNP site, or specific to particular SNP alleles at multiple different SNP sites), or specific to a polymorphic gene/transcript or genes/transcripts of interest.

[0183] Hybridization assays based on polynucleotide arrays rely on the differences in hybridization stability of the probes to perfectly matched and mismatched target sequence variants. For SNP genotyping, it is generally preferable that stringency conditions used in hybridization assays are high enough such that nucleic acid molecules that differ from one another at as little as a single SNP position can be differentiated (e.g., typical SNP hybridization assays are designed so that hybridization will occur only if one particular nucleotide is present at a SNP position, but will not occur if an alternative nucleotide is present at that SNP position). Such high stringency conditions may be preferable when using, for example, nucleic acid arrays of allele-specific probes for SNP detection. Such high stringency conditions are described in the preceding section, and are well known to those skilled in the art and can be found in, for example, Current Protocols in Molecular Biology 6.3.1-6.3.6, John Wiley & Sons, N.Y. (1989).

[0184] In other embodiments, the arrays are used in conjunction with chemiluminescent detection technology. The following patents and patent applications, which are all hereby incorporated by reference, provide additional information pertaining to chemiluminescent detection. U.S. patent applications that describe chemiluminescent approaches for microarray detection: 10/620,332 and 10/620,333. U.S. patents that describe methods and compositions of dioxetane for performing chemiluminescent detection: Nos. 6,124,478; 6,107,024; 5,994,073; 5,981,768; 5,871,938; 5,843,681; 5,800,999 and 5,773,628. And the U.S. published application that discloses methods and compositions for microarray controls: US2002/0110828.

[0185] In one embodiment of the invention, a nucleic acid array can comprise an array of probes of about 15-25 nucleotides in length. In further embodiments, a nucleic acid array can comprise any number of probes, in which at least one probe is capable of detecting one or more SNPs disclosed in Table 1 and/or Table 2, and/or at least one probe comprises a fragment of one of the sequences selected from the group consisting of those disclosed in Table 1, Table 2, the Sequence Listing, and sequences complementary thereto, said fragment comprising at least about 8 consecutive nucleotides, preferably 10, 12, 15, 16, 18, 20, more preferably 22, 25, 30, 40, 47, 50, 55, 60, 65, 70, 80, 90, 100, or more consecutive nucleotides (or any other number in-between) and containing (or being complementary to) a novel SNP allele disclosed in Table 1 and/or Table 2. In some embodiments, the nucleotide complementary to the SNP site is within 5, 4, 3, 2, or 1 nucleotide from the center of the probe, more preferably at the center of said probe.

[0186] A polynucleotide probe can be synthesized on the surface of the substrate by using a chemical coupling procedure and an ink jet application apparatus, as described in PCT application WO95/251116 (Baldeschweiler et al.) which is incorporated herein in its entirety by reference. In another aspect, a “gridded” array analogous to a dot (or slot) blot may be used to arrange and link cDNA fragments or oligonucleotides to the surface of a substrate using a vacuum system, thermal, UV, mechanical or chemical bonding procedures. An array, such as those described above, may be produced by hand or by using available devices (slot blot or dot blot apparatus), materials (any suitable solid support), and machines (including robotic instruments), and may contain 8, 24, 96, 384, 1536, 6144 or more polynucleotides, or any other number which lends itself to the efficient use of commercially available instrumentation.

[0187] Using such arrays or other kits/systems, the present invention provides methods of identifying the SNPs disclosed herein in a test sample. Such methods typically involve incubating a test sample of nucleic acids with an array comprising one or more probes corresponding to at least one SNP position of the present invention, and assaying for binding of a nucleic acid from the test sample with one or more of the probes. Conditions for incubating a SNP detection reagent (or a kit/system that employs one or more such SNP detection reagents) with a test sample vary. Incubation conditions depend on such factors as the format employed in the assay, the detection methods employed, and the type and nature of the detection reagents used in the assay. One skilled in the art will recognize that any one of the commonly available hybridization, amplification and array assay formats can readily be adapted to detect the SNPs disclosed herein.

[0188] A SNP detection kit/system of the present invention may include components that are used to prepare nucleic acids from a test sample for the subsequent amplification and/or detection of a SNP-containing nucleic acid molecule. Such sample preparation components can be used to produce nucleic acid extracts (including DNA and/or RNA), proteins or membrane extracts from any bodily fluids (such as blood, serum, plasma, urine, saliva, phlegm, gastric juices, semen, tears, sweat, etc.), skin, hair, cells (especially nucleated cells) such as buccal cells (e.g., as obtained by buccal swabs), biopsies, or tissue specimens. The test samples used in the above-described methods will vary based on such factors as the assay format, nature of the detection method, and the specific tissues, cells or extracts used as the test sample to be assayed. Methods of preparing nucleic acids, proteins, and cell extracts are well known in the art and can be readily adapted to obtain a sample that is compatible with the system utilized. Automated sample preparation systems for extracting nucleic acids from a test sample are commercially available, and examples are Qiagen's BioRobot 9600, Applied Biosystems' PRISM™ 6700 sample preparation system, and Roche Molecular Systems' COBAS AmpliPrep System.

[0189] Another form of kit contemplated by the present invention is a compartmentalized kit. A compartmentalized kit includes any kit in which reagents are contained in separate containers. Such containers include, for example, small glass containers, plastic containers, strips of plastic, glass or paper, or arraying material such as silica. Such containers allow one to efficiently transfer reagents from one compartment to another compartment such that the test samples and reagents are not cross-contaminated, or from one container to another vessel not included in the kit, and the agents or solutions of each container can be added in a quantitative fashion from one compartment to another or to another vessel. Such containers may include, for example, one or more containers which will accept the test sample, one or more containers which contain at least one probe or other SNP detection reagent for detecting one or more SNPs of the present invention, one or more containers which contain wash reagents (such as phosphate buffered saline, Tris-buffers, etc.), and one or more containers which contain the reagents used to reveal the presence of the bound probe or other SNP detection reagents. The kit can optionally further comprise compartments and/or reagents for, for example, nucleic acid amplification or other enzymatic reactions such as primer extension reactions, hybridization, ligation, electrophoresis (preferably capillary electrophoresis), mass spectrometry, and/or laser-induced fluorescent detection. The kit may also include instructions for using the kit. Exemplary compartmentalized kits include microfluidic devices known in the art. See, e.g., Weigl et al., “Lab-on-a-chip for drug development,” Adv Drug Deliv Rev 55(3):349-77 (February 2003). In such microfluidic devices, the containers may be referred to as, for example, microfluidic “compartments,” “chambers,” or “channels.”

[0190] Microfluidic devices, which may also be referred to as “lab-on-a-chip” systems, biomedical micro-electro-mechanical systems (bioMEMs), or multicomponent integrated systems, are exemplary kits/systems of the present invention for analyzing SNPs. Such systems miniaturize and compartmentalize processes such as probe/target hybridization, nucleic acid amplification, and capillary electrophoresis reactions in a single functional device. Such microfluidic devices typically utilize detection reagents in at least one aspect of the system, and such detection reagents may be used to detect one or more SNPs of the present invention. One example of a microfluidic system is disclosed in U.S. Pat. No. 5,589,136, which describes the integration of PCR amplification and capillary electrophoresis in chips. Exemplary microfluidic systems comprise a pattern of microchannels designed onto a glass, silicon, quartz, or plastic wafer included on a microchip. The movements of the samples may be controlled by electric, electroosmotic or hydrostatic forces applied across different areas of the microchip to create functional microscopic valves and pumps with no moving parts. Varying the voltage can be used as a means to control the liquid flow at intersections between the micro-machined channels and to change the liquid flow rate for pumping across different sections of the microchip. See, for example, U.S. Pat. Nos. 6,153,073, Dubrow et al., and 6,156,181, Parce et al.

[0191] For genotyping SNPs, an exemplary microfluidic system may integrate, for example, nucleic acid amplification, primer extension, capillary electrophoresis, and a detection method such as laser induced fluorescence detection. In a first step of an exemplary process for using such an exemplary system, nucleic acid samples are amplified, preferably by PCR. Then, the amplification products are subjected to automated primer extension reactions using ddNTPs (specific fluorescence for each ddNTP) and the appropriate oligonucleotide primers to carry out primer extension reactions which hybridize just upstream of the targeted SNP. Once the extension at the 3′ end is completed, the primers are separated from the unincorporated fluorescent ddNTPs by capillary electrophoresis. The separation medium used in capillary electrophoresis can be, for example, polyacrylamide, polyethyleneglycol or dextran. The incorporated ddNTPs in the single nucleotide primer extension products are identified by laser-induced fluorescence detection. Such an exemplary microchip can be used to process, for example, at least 96 to 384 samples, or more, in parallel.

[0192] Uses of Nucleic Acid Molecules

[0193] The nucleic acid molecules of the present invention have a variety of uses, particularly for predicting whether an individual will benefit from statin treatment by reducing their risk for VT in response to the statin treatment, as well as for the diagnosis, prognosis, treatment, and prevention of VT. For example, the nucleic acid molecules of the invention are useful for determining the likelihood of an individual who currently or previously has or has had VT or who is at increased risk for developing VT (such as an individual who has not yet had VT but is at increased risk for having VT in the future) of responding to treatment (or prevention) of VT with statins (such as by reducing their risk of developing primary or recurrent VT in the future), predicting the likelihood that the individual will experience toxicity or other undesirable side effects from the statin treatment, predicting an individual's risk for developing VT, etc. For example, the nucleic acid molecules are useful as hybridization probes, such as for genotyping SNPs in messenger RNA, transcript, cDNA, genomic DNA, amplified DNA or other nucleic acid molecules, and for isolating full-length cDNA and genomic clones encoding the variant peptides disclosed in Table 1 as well as their orthologs.

[0194] A probe can hybridize to any nucleotide sequence along the entire length of a nucleic acid molecule referred to in Table 1 and/or Table 2. Preferably, a probe of the present invention hybridizes to a region of a target sequence that encompasses a SNP position indicated in Table 1 and/or Table 2. More preferably, a probe hybridizes to a SNP-containing target sequence in a sequence-specific manner such that it distinguishes the target sequence from other nucleotide sequences which vary from the target sequence only by which nucleotide is present at the SNP site. Such a probe is particularly useful for detecting the presence of a SNP-containing nucleic acid in a test sample, or for determining which nucleotide (allele) is present at a particular SNP site (i.e., genotyping the SNP site).

[0195] A nucleic acid hybridization probe may be used for determining the presence, level, form, and/or distribution of nucleic acid expression. The nucleic acid whose level is determined can be DNA or RNA. Accordingly, probes specific for the SNPs described herein can be used to assess the presence, expression and/or gene copy number in a given cell, tissue, or organism. These uses are relevant for diagnosis of disorders involving an increase or decrease in gene expression relative to normal levels. In vitro techniques for detection of mRNA include, for example, Northern blot hybridizations and in situ hybridizations. In vitro techniques for detecting DNA include Southern blot hybridizations and in situ hybridizations. Sambrook and Russell, Molecular Cloning: A Laboratory Manual, Cold Spring Harbor Press, N.Y. (2000).

[0196] Probes can be used as part of a diagnostic test kit for identifying cells or tissues in which a variant protein is expressed, such as by measuring the level of a variant protein-encoding nucleic acid (e.g., mRNA) in a sample of cells from a subject or determining if a polynucleotide contains a SNP of interest.

[0197] Thus, the nucleic acid molecules of the invention can be used as hybridization probes to detect the SNPs disclosed herein, thereby determining the likelihood that an individual will respond positively to statin treatment for reducing the risk of VT, or whether an individual with the polymorphism(s) is at risk for developing VT (or has already developed early stage VT). Detection of a SNP associated with a disease phenotype provides a diagnostic tool for an active disease and/or genetic predisposition to the disease.

[0198] Furthermore, the nucleic acid molecules of the invention are therefore useful for detecting a gene (gene information is disclosed in Table 2, for example) which contains a SNP disclosed herein and/or products of such genes, such as expressed mRNA transcript molecules (transcript information is disclosed in Table 1, for example), and are thus useful for detecting gene expression. The nucleic acid molecules can optionally be implemented in, for example, an array or kit format for use in detecting gene expression.

[0199] The nucleic acid molecules of the invention are also useful as primers to amplify any given region of a nucleic acid molecule, particularly a region containing a SNP identified in Table 1 and/or Table 2.

[0200] The nucleic acid molecules of the invention are also useful for constructing recombinant vectors (described in greater detail below). Such vectors include expression vectors that express a portion of, or all of, any of the variant peptide sequences referred to in Table 1. Vectors also include insertion vectors, used to integrate into another nucleic acid molecule sequence, such as into the cellular genome, to alter in situ expression of a gene and/or gene product. For example, an endogenous coding sequence can be replaced via homologous recombination with all or part of the coding region containing one or more specifically introduced SNPs.

[0201] The nucleic acid molecules of the invention are also useful for expressing antigenic portions of the variant proteins, particularly antigenic portions that contain a variant amino acid sequence (e.g., an amino acid substitution) caused by a SNP disclosed in Table 1 and/or Table 2.

[0202] The nucleic acid molecules of the invention are also useful for constructing vectors containing a gene regulatory region of the nucleic acid molecules of the present invention.

[0203] The nucleic acid molecules of the invention are also useful for designing ribozymes corresponding to all, or a part, of an mRNA molecule expressed from a SNP-containing nucleic acid molecule described herein.

[0204] The nucleic acid molecules of the invention are also useful for constructing host cells expressing a part, or all, of the nucleic acid molecules and variant peptides.

[0205] The nucleic acid molecules of the invention are also useful for constructing transgenic animals expressing all, or a part, of the nucleic acid molecules and variant peptides. The production of recombinant cells and transgenic animals having nucleic acid molecules which contain the SNPs disclosed in Table 1 and/or Table 2 allows, for example, effective clinical design of treatment compounds and dosage regimens.

[0206] The nucleic acid molecules of the invention are also useful in assays for drug screening to identify compounds that, for example, modulate nucleic acid expression. The nucleic acid molecules of the invention are also useful in gene therapy in patients whose cells have aberrant gene expression. Thus, recombinant cells, which include a patient's cells that have been engineered ex vivo and returned to the patient, can be introduced into an individual where the recombinant cells produce the desired protein to treat the individual.

[0207] SNP Genotyping Methods

[0208] The process of determining which nucleotide(s) is/are present at each of one or more SNP positions (such as a SNP position disclosed in Table 1 and/or Table 2), for either or both alleles, may be referred to by such phrases as SNP genotyping, determining the “identity” of a SNP, determining the “content” of a SNP, or determining which nucleotide(s)/allele(s) is/are present at a SNP position. Thus, these terms can refer to detecting a single allele (nucleotide) at a SNP position or can encompass detecting both alleles (nucleotides) at a SNP position (such as to determine the homozygous or heterozygous state of a SNP position). Furthermore, these terms may also refer to detecting an amino acid residue encoded by a SNP (such as alternative amino acid residues that are encoded by different codons created by alternative nucleotides at a missense SNP position, for example).

[0209] The present invention provides methods of SNP genotyping, such as for use in implementing a preventive or treatment regimen for an individual based on that individual having an increased susceptibility for developing VT and/or an increased likelihood of benefiting from statin treatment for reducing the risk of VT, in evaluating an individual's likelihood of responding to statin treatment (particularly for treating or preventing VT), in selecting a treatment or preventive regimen (e.g., in deciding whether or not to administer statin treatment to an individual having VT, or who is at increased risk for developing VT in the future), or in formulating or selecting a particular statin-based treatment or preventive regimen such as dosage and/or frequency of administration of statin treatment or choosing which form/type of statin to be administered, such as a particular pharmaceutical composition or compound, etc.), determining the likelihood of experiencing toxicity or other undesirable side effects from statin treatment, or selecting individuals for a clinical trial of a statin (e.g., selecting individuals to participate in the trial who are most likely to respond positively from the statin treatment and/or excluding individuals from the trial who are unlikely to respond positively from the statin treatment based on their SNP genotype(s), or selecting individuals who are unlikely to respond positively to statins based on their SNP genotype(s) to participate in a clinical trial of another type of drug that may benefit them), etc. The SNP genotyping methods of the invention can also be useful for evaluating an individual's risk for developing VT and for predicting the likelihood that an individual who has previously had VT will have a recurrence of VT again in the future (recurrent VT).

[0210] Nucleic acid samples can be genotyped to determine which allele(s) is/are present at any given genetic region (e.g., SNP position) of interest by methods well known in the art. The neighboring sequence can be used to design SNP detection reagents such as oligonucleotide probes, which may optionally be implemented in a kit format. Exemplary SNP genotyping methods are described in Chen et al., “Single nucleotide polymorphism genotyping: biochemistry, protocol, cost and throughput,” Pharmacogenomics J 3(2):77-96 (2003); Kwok et al., “Detection of single nucleotide polymorphisms,” Curr Issues Mol Biol 5(2):43-60 (April 2003); Shi, “Technologies for individual genotyping: detection of genetic polymorphisms in drug targets and disease genes,” Am J Pharmacogenomics 2(3):197-205 (2002); and Kwok, “Methods for genotyping single nucleotide polymorphisms,” Annu Rev Genomics Hum Genet. 2:235-58 (2001). Exemplary techniques for high-throughput SNP genotyping are described in Marnellos, “High-throughput SNP analysis for genetic association studies,” Curr Opin Drug Discov Devel 6(3):317-21 (May 2003). Common SNP genotyping methods include, but are not limited to, TaqMan assays, molecular beacon assays, nucleic acid arrays, allele-specific primer extension, allele-specific PCR, arrayed primer extension, homogeneous primer extension assays, primer extension with detection by mass spectrometry, pyrosequencing, multiplex primer extension sorted on genetic arrays, ligation with rolling circle amplification, homogeneous ligation, OLA (U.S. Pat. No. 4,988,167), multiplex ligation reaction sorted on genetic arrays, restriction-fragment length polymorphism, single base extension-tag assays, and the Invader assay. Such methods may be used in combination with detection mechanisms such as, for example, luminescence or chemiluminescence detection, fluorescence detection, time-resolved fluorescence detection, fluorescence resonance energy transfer, fluorescence polarization, mass spectrometry, and electrical detection.

[0211] Various methods for detecting polymorphisms include, but are not limited to, methods in which protection from cleavage agents is used to detect mismatched bases in RNA/RNA or RNA/DNA duplexes (Myers et al., Science 230:1242 (1985); Cotton et al., PNAS 85:4397 (1988); and Saleeba et al., Meth. Enzymol 217:286-295 (1992)), comparison of the electrophoretic mobility of variant and wild type nucleic acid molecules (Orita et al., PNAS 86:2766 (1989); Cotton et al., Mutat Res 285:125-144 (1993); and Hayashi et al., Genet Anal Tech Appl 9:73-79 (1992)), and assaying the movement of polymorphic or wild-type fragments in polyacrylamide gels containing a gradient of denaturant using denaturing gradient gel electrophoresis (DGGE) (Myers et al., Nature 313:495 (1985)). Sequence variations at specific locations can also be assessed by nuclease protection assays such as RNase and S1 protection or chemical cleavage methods.

[0212] In a preferred embodiment, SNP genotyping is performed using the TaqMan assay, which is also known as the 5′ nuclease assay (U.S. Pat. Nos. 5,210,015 and 5,538,848). The TaqMan assay detects the accumulation of a specific amplified product during PCR. The TaqMan assay utilizes an oligonucleotide probe labeled with a fluorescent reporter dye and a quencher dye. The reporter dye is excited by irradiation at an appropriate wavelength, it transfers energy to the quencher dye in the same probe via a process called fluorescence resonance energy transfer (FRET). When attached to the probe, the excited reporter dye does not emit a signal. The proximity of the quencher dye to the reporter dye in the intact probe maintains a reduced fluorescence for the reporter. The reporter dye and quencher dye may be at the 5′ most and the 3′ most ends, respectively, or vice versa. Alternatively, the reporter dye may be at the 5′ or 3′ most end while the quencher dye is attached to an internal nucleotide, or vice versa. In yet another embodiment, both the reporter and the quencher may be attached to internal nucleotides at a distance from each other such that fluorescence of the reporter is reduced.

[0213] During PCR, the 5′ nuclease activity of DNA polymerase cleaves the probe, thereby separating the reporter dye and the quencher dye and resulting in increased fluorescence of the reporter. Accumulation of PCR product is detected directly by monitoring the increase in fluorescence of the reporter dye. The DNA polymerase cleaves the probe between the reporter dye and the quencher dye only if the probe hybridizes to the target SNP-containing template which is amplified during PCR, and the probe is designed to hybridize to the target SNP site only if a particular SNP allele is present.

[0214] Preferred TaqMan primer and probe sequences can readily be determined using the SNP and associated nucleic acid sequence information provided herein. A number of computer programs, such as Primer Express (Applied Biosystems, Foster City, Calif.), can be used to rapidly obtain optimal primer/probe sets. It will be apparent to one of skill in the art that such primers and probes for detecting the SNPs of the present invention are useful in, for example, screening individuals for their likelihood of responding to statin treatment (i.e., benefiting from statin treatment), particularly individuals who have or are susceptible to VT, or in screening for individuals who are susceptible to developing VT. These probes and primers can be readily incorporated into a kit format. The present invention also includes modifications of the Taqman assay well known in the art such as the use of Molecular Beacon probes (U.S. Pat. Nos. 5,118,801 and 5,312,728) and other variant formats (U.S. Pat. Nos. 5,866,336 and 6,117,635).

[0215] Another preferred method for genotyping the SNPs of the present invention is the use of two oligonucleotide probes in an OLA (see, e.g., U.S. Pat. No. 4,988,617). In this method, one probe hybridizes to a segment of a target nucleic acid with its 3′ most end aligned with the SNP site. A second probe hybridizes to an adjacent segment of the target nucleic acid molecule directly 3′ to the first probe. The two juxtaposed probes hybridize to the target nucleic acid molecule, and are ligated in the presence of a linking agent such as a ligase if there is perfect complementarity between the 3′ most nucleotide of the first probe with the SNP site. If there is a mismatch, ligation would not occur. After the reaction, the ligated probes are separated from the target nucleic acid molecule, and detected as indicators of the presence of a SNP.

[0216] The following patents, patent applications, and published international patent applications, which are all hereby incorporated by reference, provide additional information pertaining to techniques for carrying out various types of OLA. The following U.S. patents describe OLA strategies for performing SNP detection: Nos. 6,027,889; 6,268,148; 5,494,810; 5,830,711 and 6,054,564. WO 97/31256 and WO 00/56927 describe OLA strategies for performing SNP detection using universal arrays, wherein a zipcode sequence can be introduced into one of the hybridization probes, and the resulting product, or amplified product, hybridized to a universal zip code array. U.S. application US01/17329 (and 09/584,905) describes OLA (or LDR) followed by PCR, wherein zipcodes are incorporated into OLA probes, and amplified PCR products are determined by electrophoretic or universal zipcode array readout. U.S. applications 60/427,818, 60/445,636, and 60/445,494 describe SNPlex methods and software for multiplexed SNP detection using OLA followed by PCR, wherein zipcodes are incorporated into OLA probes, and amplified PCR products are hybridized with a zipchute reagent, and the identity of the SNP determined from electrophoretic readout of the zipchute. In some embodiments, OLA is carried out prior to PCR (or another method of nucleic acid amplification). In other embodiments, PCR (or another method of nucleic acid amplification) is carried out prior to OLA.

[0217] Another method for SNP genotyping is based on mass spectrometry. Mass spectrometry takes advantage of the unique mass of each of the four nucleotides of DNA. SNPs can be unambiguously genotyped by mass spectrometry by measuring the differences in the mass of nucleic acids having alternative SNP alleles. MALDI-TOF (Matrix Assisted Laser Desorption Ionization—Time of Flight) mass spectrometry technology is preferred for extremely precise determinations of molecular mass, such as SNPs. Numerous approaches to SNP analysis have been developed based on mass spectrometry. Preferred mass spectrometry-based methods of SNP genotyping include primer extension assays, which can also be utilized in combination with other approaches, such as traditional gel-based formats and microarrays.

[0218] Typically, the primer extension assay involves designing and annealing a primer to a template PCR amplicon upstream (5′) from a target SNP position. A mix of dideoxynucleotide triphosphates (ddNTPs) and/or deoxynucleotide triphosphates (dNTPs) are added to a reaction mixture containing template (e.g., a SNP-containing nucleic acid molecule which has typically been amplified, such as by PCR), primer, and DNA polymerase. Extension of the primer terminates at the first position in the template where a nucleotide complementary to one of the ddNTPs in the mix occurs. The primer can be either immediately adjacent (i.e., the nucleotide at the 3′ end of the primer hybridizes to the nucleotide next to the target SNP site) or two or more nucleotides removed from the SNP position. If the primer is several nucleotides removed from the target SNP position, the only limitation is that the template sequence between the 3′ end of the primer and the SNP position cannot contain a nucleotide of the same type as the one to be detected, or this will cause premature termination of the extension primer. Alternatively, if all four ddNTPs alone, with no dNTPs, are added to the reaction mixture, the primer will always be extended by only one nucleotide, corresponding to the target SNP position. In this instance, primers are designed to bind one nucleotide upstream from the SNP position (i.e., the nucleotide at the 3′ end of the primer hybridizes to the nucleotide that is immediately adjacent to the target SNP site on the 5′ side of the target SNP site). Extension by only one nucleotide is preferable, as it minimizes the overall mass of the extended primer, thereby increasing the resolution of mass differences between alternative SNP nucleotides. Furthermore, mass-tagged ddNTPs can be employed in the primer extension reactions in place of unmodified ddNTPs. This increases the mass difference between primers extended with these ddNTPs, thereby providing increased sensitivity and accuracy, and is particularly useful for typing heterozygous base positions. Mass-tagging also alleviates the need for intensive sample-preparation procedures and decreases the necessary resolving power of the mass spectrometer.

[0219] The extended primers can then be purified and analyzed by MALDI-TOF mass spectrometry to determine the identity of the nucleotide present at the target SNP position. In one method of analysis, the products from the primer extension reaction are combined with light absorbing crystals that form a matrix. The matrix is then hit with an energy source such as a laser to ionize and desorb the nucleic acid molecules into the gas-phase. The ionized molecules are then ejected into a flight tube and accelerated down the tube towards a detector. The time between the ionization event, such as a laser pulse, and collision of the molecule with the detector is the time of flight of that molecule. The time of flight is precisely correlated with the mass-to-charge ratio (m/z) of the ionized molecule. Ions with smaller m/z travel down the tube faster than ions with larger m/z and therefore the lighter ions reach the detector before the heavier ions. The time-of-flight is then converted into a corresponding, and highly precise, m/z. In this manner, SNPs can be identified based on the slight differences in mass, and the corresponding time of flight differences, inherent in nucleic acid molecules having different nucleotides at a single base position. For further information regarding the use of primer extension assays in conjunction with MALDI-TOF mass spectrometry for SNP genotyping, see, e.g., Wise et al., “A standard protocol for single nucleotide primer extension in the human genome using matrix-assisted laser desorption/ionization time-of-flight mass spectrometry,” Rapid Commun Mass Spectrom 17(11):1195-202 (2003).

[0220] The following references provide further information describing mass spectrometry-based methods for SNP genotyping: Bocker, “SNP and mutation discovery using base-specific cleavage and MALDI-TOF mass spectrometry,” Bioinformatics 19 Suppl 1:144-153 (July 2003); Storm et al., “MALDI-TOF mass spectrometry-based SNP genotyping,” Methods Mol Biol 212:241-62 (2003); Jurinke et al., “The use of Mass ARRAY technology for high throughput genotyping,” Adv Biochem Eng Biotechnol 77:57-74 (2002); and Jurinke et al., “Automated genotyping using the DNA MassArray technology,” Methods Mol Biol 187:179-92 (2002).

[0221] SNPs can also be scored by direct DNA sequencing. A variety of automated sequencing procedures can be utilized (e.g. Biotechniques 19:448 (1995)), including sequencing by mass spectrometry. See, e.g., PCT International Publication No. WO 94/16101; Cohen et al., Adv Chromatogr 36:127-162 (1996); and Griffin et al., Appl Biochem Biotechnol 38:147-159 (1993). The nucleic acid sequences of the present invention enable one of ordinary skill in the art to readily design sequencing primers for such automated sequencing procedures. Commercial instrumentation, such as the Applied Biosystems 377, 3100, 3700, 3730, and 3730×1 DNA Analyzers (Foster City, Calif.), is commonly used in the art for automated sequencing.

[0222] Other methods that can be used to genotype the SNPs of the present invention include single-strand conformational polymorphism (SSCP), and denaturing gradient gel electrophoresis (DGGE). Myers et al., Nature 313:495 (1985). SSCP identifies base differences by alteration in electrophoretic migration of single stranded PCR products, as described in Orita et al., Proc. Nat. Acad. Single-stranded PCR products can be generated by heating or otherwise denaturing double stranded PCR products. Single-stranded nucleic acids may refold or form secondary structures that are partially dependent on the base sequence. The different electrophoretic mobilities of single-stranded amplification products are related to base-sequence differences at SNP positions. DGGE differentiates SNP alleles based on the different sequence-dependent stabilities and melting properties inherent in polymorphic DNA and the corresponding differences in electrophoretic migration patterns in a denaturing gradient gel. PCR Technology: Principles and Applications for DNA Amplification Chapter 7, Erlich, ed., W.H. Freeman and Co, N.Y. (1992).

[0223] Sequence-specific ribozymes (U.S. Pat. No. 5,498,531) can also be used to score SNPs based on the development or loss of a ribozyme cleavage site. Perfectly matched sequences can be distinguished from mismatched sequences by nuclease cleavage digestion assays or by differences in melting temperature. If the SNP affects a restriction enzyme cleavage site, the SNP can be identified by alterations in restriction enzyme digestion patterns, and the corresponding changes in nucleic acid fragment lengths determined by gel electrophoresis.

[0224] SNP genotyping can include the steps of, for example, collecting a biological sample from a human subject (e.g., sample of tissues, cells, fluids, secretions, etc.), isolating nucleic acids (e.g., genomic DNA, mRNA or both) from the cells of the sample, contacting the nucleic acids with one or more primers which specifically hybridize to a region of the isolated nucleic acid containing a target SNP under conditions such that hybridization and amplification of the target nucleic acid region occurs, and determining the nucleotide present at the SNP position of interest, or, in some assays, detecting the presence or absence of an amplification product (assays can be designed so that hybridization and/or amplification will only occur if a particular SNP allele is present or absent). In some assays, the size of the amplification product is detected and compared to the length of a control sample; for example, deletions and insertions can be detected by a change in size of the amplified product compared to a normal genotype.

[0225] SNP genotyping is useful for numerous practical applications, as described below. Examples of such applications include, but are not limited to, SNP-disease association analysis, disease predisposition screening, disease diagnosis, disease prognosis, disease progression monitoring, determining therapeutic strategies based on an individual's genotype (“pharmacogenomics”), developing therapeutic agents based on SNP genotypes associated with a disease or likelihood of responding to a drug, stratifying patient populations for clinical trials of a therapeutic, preventive, or diagnostic agent, and predicting the likelihood that an individual will experience toxic side effects from a therapeutic agent.

[0226] Analysis of Genetic Associations between SNPs and Phenotypic Traits

[0227] SNP genotyping for disease diagnosis, disease predisposition screening, disease prognosis, determining drug responsiveness (pharmacogenomics), drug toxicity screening, and other uses described herein, typically relies on initially establishing a genetic association between one or more specific SNPs and the particular phenotypic traits of interest.

[0228] Different study designs may be used for genetic association studies. Modern Epidemiology 609-622, Lippincott, Williams & Wilkins (1998). Observational studies are most frequently carried out in which the response of the patients is not interfered with. The first type of observational study identifies a sample of persons in whom the suspected cause of the disease is present and another sample of persons in whom the suspected cause is absent, and then the frequency of development of disease in the two samples is compared. These sampled populations are called cohorts, and the study is a prospective study. The other type of observational study is case-control or a retrospective study. In typical case-control studies, samples are collected from individuals with the phenotype of interest (cases) such as certain manifestations of a disease, and from individuals without the phenotype (controls) in a population (target population) that conclusions are to be drawn from. Then the possible causes of the disease are investigated retrospectively. As the time and costs of collecting samples in case-control studies are considerably less than those for prospective studies, case-control studies are the more commonly used study design in genetic association studies, at least during the exploration and discovery stage.

[0229] Case-only studies are an alternative to case-control studies when gene-environment interaction is the association of interest (Piegorsch et al., “Non-hierarchical logistic models and case-only designs for assessing susceptibility in population-based case-control studies”, Statistics in Medicine 13 (1994) pp 153-162). In a typical case-only study of gene-environment interaction, genotypes are obtained only from cases who are often selected from an existing cohort study. The association between genotypes and the environmental factor is then assessed and a significant association implies that the effect of the environmental factor on the endpoint of interest (the case definition) differs by genotype. The primary assumption underlying the test of association in case-only studies is that the environmental effect of interest is independent of genotype (e.g., allocation to statin therapy is independent of genotype) and it has been shown that the case-only design has more power than the case-control design to detect gene-environment interaction when this assumption is true in the population (Yang et al., “Sample Size Requirements in Case-Only Designs to Detect Gene-Environment Interaction”, American Journal of Epidemiology 146:9 (1997) pp 713-720). Selecting cases from a randomized clinical trial may be an ideal setting in which to perform a case-only study since genotypes will be independent of treatment by design.

[0230] In observational studies, there may be potential confounding factors that should be taken into consideration. Confounding factors are those that are associated with both the real cause(s) of the disease and the disease itself, and they include demographic information such as age, gender, ethnicity as well as environmental factors. When confounding factors are not matched in cases and controls in a study, and are not controlled properly, spurious association results can arise. If potential confounding factors are identified, they should be controlled for by analysis methods explained below.

[0231] In a genetic association study, the cause of interest to be tested is a certain allele or a SNP or a combination of alleles or a haplotype from several SNPs. Thus, tissue specimens (e.g., whole blood) from the sampled individuals may be collected and genomic DNA genotyped for the SNP(s) of interest. In addition to the phenotypic trait of interest, other information such as demographic (e.g., age, gender, ethnicity, etc.), clinical, and environmental information that may influence the outcome of the trait can be collected to further characterize and define the sample set. In many cases, these factors are known to be associated with diseases and/or SNP allele frequencies. There are likely gene-environment and/or gene-gene interactions as well. Analysis methods to address gene-environment and gene-gene interactions (for example, the effects of the presence of both susceptibility alleles at two different genes can be greater than the effects of the individual alleles at two genes combined) are discussed below.

[0232] After all the relevant phenotypic and genotypic information has been obtained, statistical analyses are carried out to determine if there is any significant correlation between the presence of an allele or a genotype with the phenotypic characteristics of an individual. Preferably, data inspection and cleaning are first performed before carrying out statistical tests for genetic association. Epidemiological and clinical data of the samples can be summarized by descriptive statistics with tables and graphs. Data validation is preferably performed to check for data completion, inconsistent entries, and outliers. Chi-squared tests and t-tests (Wilcoxon rank-sum tests if distributions are not normal) may then be used to check for significant differences between cases and controls for discrete and continuous variables, respectively. To ensure genotyping quality, Hardy-Weinberg disequilibrium tests can be performed on cases and controls separately. Significant deviation from Hardy-Weinberg equilibrium (HWE) in both cases and controls for individual markers can be indicative of genotyping errors. If HWE is violated in a majority of markers, it is indicative of population substructure that should be further investigated. Moreover, Hardy-Weinberg disequilibrium in cases only can indicate genetic association of the markers with the disease. B. Weir, Genetic Data Analysis, Sinauer (1990).

[0233] To test whether an allele of a single SNP is associated with the case or control status of a phenotypic trait, one skilled in the art can compare allele frequencies in cases and controls. Standard chi-squared tests and Fisher exact tests can be carried out on a 2×2 table (2 SNP alleles×2 outcomes in the categorical trait of interest). To test whether genotypes of a SNP are associated, chi-squared tests can be carried out on a 3×2 table (3 genotypes×2 outcomes). Score tests are also carried out for genotypic association to contrast the three genotypic frequencies (major homozygotes, heterozygotes and minor homozygotes) in cases and controls, and to look for trends using 3 different modes of inheritance, namely dominant (with contrast coefficients 2, −1, −1), additive or allelic (with contrast coefficients 1,0, −1) and recessive (with contrast coefficients 1,1, −2). Odds ratios for minor versus major alleles, and odds ratios for heterozygote and homozygote variants versus the wild type genotypes are calculated with the desired confidence limits, usually 95%.

[0234] In order to control for confounders and to test for interaction and effect modifiers, stratified analyses may be performed using stratified factors that are likely to be confounding, including demographic information such as age, ethnicity, and gender, or an interacting element or effect modifier, such as a known major gene (e.g., APOE for Alzheimer's disease or HLA genes for autoimmune diseases), or environmental factors such as smoking in lung cancer. Stratified association tests may be carried out using Cochran-Mantel-Haenszel tests that take into account the ordinal nature of genotypes with 0, 1, and 2 variant alleles. Exact tests by StatXact may also be performed when computationally possible. Another way to adjust for confounding effects and test for interactions is to perform stepwise multiple logistic regression analysis using statistical packages such as SAS or R. Logistic regression is a model-building technique in which the best fitting and most parsimonious model is built to describe the relation between the dichotomous outcome (for instance, getting a certain disease or not) and a set of independent variables (for instance, genotypes of different associated genes, and the associated demographic and environmental factors). The most common model is one in which the logit transformation of the odds ratios is expressed as a linear combination of the variables (main effects) and their cross-product terms (interactions). Hosmer and Lemeshow, Applied Logistic Regression, Wiley (2000). To test whether a certain variable or interaction is significantly associated with the outcome, coefficients in the model are first estimated and then tested for statistical significance of their departure from zero.

[0235] In addition to performing association tests one marker at a time, haplotype association analysis may also be performed to study a number of markers that are closely linked together. Haplotype association tests can have better power than genotypic or allelic association tests when the tested markers are not the disease-causing mutations themselves but are in linkage disequilibrium with such mutations. The test will even be more powerful if the disease is indeed caused by a combination of alleles on a haplotype (e.g., APOE is a haplotype formed by 2 SNPs that are very close to each other). In order to perform haplotype association effectively, marker-marker linkage disequilibrium measures, both D′ and r², are typically calculated for the markers within a gene to elucidate the haplotype structure. Recent studies in linkage disequilibrium indicate that SNPs within a gene are organized in block pattern, and a high degree of linkage disequilibrium exists within blocks and very little linkage disequilibrium exists between blocks. Daly et al, Nature Genetics 29:232-235 (2001). Haplotype association with the disease status can be performed using such blocks once they have been elucidated.

[0236] Haplotype association tests can be carried out in a similar fashion as the allelic and genotypic association tests. Each haplotype in a gene is analogous to an allele in a multi-allelic marker. One skilled in the art can either compare the haplotype frequencies in cases and controls or test genetic association with different pairs of haplotypes. It has been proposed that score tests can be done on haplotypes using the program “haplo.score.” Schaid et al, Am J Hum Genet. 70:425-434 (2002). In that method, haplotypes are first inferred by EM algorithm and score tests are carried out with a generalized linear model (GLM) framework that allows the adjustment of other factors.

[0237] An important decision in the performance of genetic association tests is the determination of the significance level at which significant association can be declared when the P value of the tests reaches that level. In an exploratory analysis where positive hits will be followed up in subsequent confirmatory testing, an unadjusted P value <0.2 (a significance level on the lenient side), for example, may be used for generating hypotheses for significant association of a SNP with certain phenotypic characteristics of a disease. It is preferred that a p-value <0.05 (a significance level traditionally used in the art) is achieved in order for a SNP to be considered to have an association with a disease. It is more preferred that a p-value <0.01 (a significance level on the stringent side) is achieved for an association to be declared. When hits are followed up in confirmatory analyses in more samples of the same source or in different samples from different sources, adjustment for multiple testing will be performed as to avoid excess number of hits while maintaining the experiment-wide error rates at 0.05. While there are different methods to adjust for multiple testing to control for different kinds of error rates, a commonly used but rather conservative method is Bonferroni correction to control the experiment-wise or family-wise error rate. Westfall et al., Multiple comparisons and multiple tests, SAS Institute (1999). Permutation tests to control for the false discovery rates, FDR, can be more powerful. Benjamini and Hochberg, Journal of the Royal Statistical Society, Series B 57:1289-1300 (1995); Westfall and Young, Resampling-based Multiple Testing, Wiley (1993). Such methods to control for multiplicity would be preferred when the tests are dependent and controlling for false discovery rates is sufficient as opposed to controlling for the experiment-wise error rates.

[0238] In replication studies using samples from different populations after statistically significant markers have been identified in the exploratory stage, meta-analyses can then be performed by combining evidence of different studies. Modern Epidemiology 643-673, Lippincott, Williams & Wilkins (1998). If available, association results known in the art for the same SNPs can be included in the meta-analyses.

[0239] Since both genotyping and disease status classification can involve errors, sensitivity analyses may be performed to see how odds ratios and p-values would change upon various estimates on genotyping and disease classification error rates.

[0240] It has been well known that subpopulation-based sampling bias between cases and controls can lead to spurious results in case-control association studies when prevalence of the disease is associated with different subpopulation groups. Ewens and Spielman, Am J Hum Genet. 62:450-458 (1995). Such bias can also lead to a loss of statistical power in genetic association studies. To detect population stratification, Pritchard and Rosenberg suggested typing markers that are unlinked to the disease and using results of association tests on those markers to determine whether there is any population stratification. Pritchard et al., Am J Hum Gen 65:220-228 (1999). When stratification is detected, the genomic control (GC) method as proposed by Devlin and Roeder can be used to adjust for the inflation of test statistics due to population stratification. Devlin et al., Biometrics 55:997-1004 (1999). The GC method is robust to changes in population structure levels as well as being applicable to DNA pooling designs. Devlin et al., Genet Epidem 21:273-284 (2001).

[0241] While Pritchard's method recommended using 15-20 unlinked microsatellite markers, it suggested using more than 30 biallelic markers to get enough power to detect population stratification. For the GC method, it has been shown that about 60-70 biallelic markers are sufficient to estimate the inflation factor for the test statistics due to population stratification. Bacanu et al., Am J Hum Genet. 66:1933-1944 (2000). Hence, 70 intergenic SNPs can be chosen in unlinked regions as indicated in a genome scan. Kehoe et al., Hum Mol Genet. 8:237-245 (1999).

[0242] Once individual risk factors, genetic or non-genetic, have been found for the predisposition to disease, the next step is to set up a classification/prediction scheme to predict the category (for instance, disease or no-disease) that an individual will be in depending on his genotypes of associated SNPs and other non-genetic risk factors. Logistic regression for discrete trait and linear regression for continuous trait are standard techniques for such tasks. Draper and Smith, Applied Regression Analysis, Wiley (1998). Moreover, other techniques can also be used for setting up classification. Such techniques include, but are not limited to, MART, CART, neural network, and discriminant analyses that are suitable for use in comparing the performance of different methods. The Elements of Statistical Learning, Hastie, Tibshirani & Friedman, Springer (2002).

[0243] For further information about genetic association studies, see Balding, “A tutorial on statistical methods for population association studies”, Nature Reviews Genetics 7, 781 (2006).

[0244] Disease Diagnosis and Predisposition Screening

[0245] Information on association/correlation between genotypes and disease-related phenotypes can be exploited in several ways. For example, in the case of a highly statistically significant association between one or more SNPs with predisposition to a disease for which treatment is available, detection of such a genotype pattern in an individual may justify immediate administration of treatment, or at least the institution of regular monitoring of the individual. Detection of the susceptibility alleles associated with serious disease in a couple contemplating having children may also be valuable to the couple in their reproductive decisions. In the case of a weaker but still statistically significant association between a SNP and a human disease, immediate therapeutic intervention or monitoring may not be justified after detecting the susceptibility allele or SNP. Nevertheless, the subject can be motivated to begin simple life-style changes (e.g., diet, exercise) that can be accomplished at little or no cost to the individual but would confer potential benefits in reducing the risk of developing conditions for which that individual may have an increased risk by virtue of having the risk allele(s).

[0246] The SNPs of the invention may contribute to responsiveness of an individual to statin treatment, or to the development of VT, in different ways. Some polymorphisms occur within a protein coding sequence and contribute to disease phenotype by affecting protein structure. Other polymorphisms occur in noncoding regions but may exert phenotypic effects indirectly via influence on, for example, replication, transcription, and/or translation. A single SNP may affect more than one phenotypic trait. Likewise, a single phenotypic trait may be affected by multiple SNPs in different genes.

[0247] As used herein, the terms “diagnose,” “diagnosis,” and “diagnostics” include, but are not limited to, any of the following: detection of VT that an individual may presently have, predisposition/susceptibility/predictive screening (i.e., determining whether an individual has an increased or decreased risk of developing VT in the future), predicting recurrence of VT in an individual, determining a particular type or subclass of VT in an individual who currently or previously had VT, confirming or reinforcing a previously made diagnosis of VT, evaluating an individual's likelihood of responding positively to a particular treatment or therapeutic agent (i.e., benefiting) such as statin treatment (particularly treatment or prevention of VT using statins), determining or selecting a therapeutic or preventive strategy that an individual is most likely to positively respond to (e.g., selecting a particular therapeutic agent such as a statin, or combination of therapeutic agents, or selecting a particular statin from among other statins, or determining a dosing regimen or selecting a dosage formulation, etc.), classifying (or confirming/reinforcing) an individual as a responder/non-responder (or determining a particular subtype of responder/non-responder) with respect to the individual's response to a drug treatment such as statin treatment, and predicting whether a patient is likely to experience toxic effects from a particular treatment or therapeutic compound. Such diagnostic uses can be based on the SNPs individually or a unique combination or SNPs disclosed herein, as well as SNP haplotypes.

[0248] Haplotypes are particularly useful in that, for example, fewer SNPs can be genotyped to determine if a particular genomic region harbors a locus that influences a particular phenotype, such as in linkage disequilibrium-based SNP association analysis.

[0249] Linkage disequilibrium (LD) refers to the co-inheritance of alleles (e.g., alternative nucleotides) at two or more different SNP sites at frequencies greater than would be expected from the separate frequencies of occurrence of each allele in a given population. The expected frequency of co-occurrence of two alleles that are inherited independently is the frequency of the first allele multiplied by the frequency of the second allele. Alleles that co-occur at expected frequencies are said to be in “linkage equilibrium.” In contrast, LD refers to any non-random genetic association between allele(s) at two or more different SNP sites, which is generally due to the physical proximity of the two loci along a chromosome. LD can occur when two or more SNPs sites are in close physical proximity to each other on a given chromosome and therefore alleles at these SNP sites will tend to remain unseparated for multiple generations with the consequence that a particular nucleotide (allele) at one SNP site will show a non-random association with a particular nucleotide (allele) at a different SNP site located nearby. Hence, genotyping one of the SNP sites will give almost the same information as genotyping the other SNP site that is in LD.

[0250] Various degrees of LD can be encountered between two or more SNPs with the result being that some SNPs are more closely associated (i.e., in stronger LD) than others. Furthermore, the physical distance over which LD extends along a chromosome differs between different regions of the genome, and therefore the degree of physical separation between two or more SNP sites necessary for LD to occur can differ between different regions of the genome.

[0251] For diagnostic purposes and similar uses, if a particular SNP site is found to be useful for, for example, predicting an individual's response to statin treatment or an individual's susceptibility to VT, then the skilled artisan would recognize that other SNP sites which are in LD with this SNP site would also be useful for the same purposes. Thus, polymorphisms (e.g., SNPs and/or haplotypes) that are not the actual disease-causing (causative) polymorphisms, but are in LD with such causative polymorphisms, are also useful. In such instances, the genotype of the polymorphism(s) that is/are in LD with the causative polymorphism is predictive of the genotype of the causative polymorphism and, consequently, predictive of the phenotype (e.g., response to statin treatment or risk for developing VT) that is influenced by the causative SNP(s). Therefore, polymorphic markers that are in LD with causative polymorphisms are useful as diagnostic markers, and are particularly useful when the actual causative polymorphism(s) is/are unknown.

[0252] Examples of polymorphisms that can be in LD with one or more causative polymorphisms (and/or in LD with one or more polymorphisms that have a significant statistical association with a condition) and therefore useful for diagnosing the same condition that the causative/associated SNP(s) is used to diagnose, include other SNPs in the same gene, protein-coding, or mRNA transcript-coding region as the causative/associated SNP, other SNPs in the same exon or same intron as the causative/associated SNP, other SNPs in the same haplotype block as the causative/associated SNP, other SNPs in the same intergenic region as the causative/associated SNP, SNPs that are outside but near a gene (e.g., within 6 kb on either side, 5′ or 3′, of a gene boundary) that harbors a causative/associated SNP, etc. Such useful LD SNPs can be selected from among the SNPs disclosed in Table 3, for example.

[0253] Linkage disequilibrium in the human genome is reviewed in Wall et al., “Haplotype blocks and linkage disequilibrium in the human genome,” Nat Rev Genet. 4(8):587-97 (August 2003); Garner et al., “On selecting markers for association studies: patterns of linkage disequilibrium between two and three diallelic loci,” Genet Epidemiol 24(1):57-67 (January 2003); Ardlie et al., “Patterns of linkage disequilibrium in the human genome,” Nat Rev Genet. 3(4):299-309 (April 2002); erratum in Nat Rev Genet. 3(7):566 (July 2002); and Remm et al., “High-density genotyping and linkage disequilibrium in the human genome using chromosome 22 as a model,” Curr Opin Chem Biol 6(1):24-30 (Feb. 2002); J. B. S. Haldane, “The combination of linkage values, and the calculation of distances between the loci of linked factors,” J Genet. 8:299-309 (1919); G. Mendel, Versuche über Pflanzen-Hybriden. Verhandlungen des naturforschenden Vereines in Brünn (Proceedings of the Natural History Society of Brünn) (1866); Genes IV, B. Lewin, ed., Oxford University Press, N.Y. (1990); D. L. Hartl and A. G. Clark Principles of Population Genetics 2^{nd} ed., Sinauer Associates, Inc., Mass. (1989); J. H. Gillespie Population Genetics: A Concise Guide.2^{nd} ed., Johns Hopkins University Press (2004); R. C. Lewontin, “The interaction of selection and linkage. I. General considerations; heterotic models,” Genetics 49:49-67 (1964); P. G. Hoel, Introduction to Mathematical Statistics 2^{nd} ed., John Wiley & Sons, Inc., N.Y. (1954); R.R. Hudson, “Two-locus sampling distributions and their application,” Genetics 159:1805-1817 (2001); A. P. Dempster, N. M. Laird, D. B. Rubin, “Maximum likelihood from incomplete data via the EM algorithm,” J R Stat Soc 39:1-38 (1977); L. Excoffier, M. Slatkin, “Maximum-likelihood estimation of molecular haplotype frequencies in a diploid population,” Mol Biol Evol 12(5):921-927 (1995); D. A. Tregouet, S. Escolano, L. Tiret, A. Mallet, J. L. Golmard, “A new algorithm for haplotype-based association analysis: the Stochastic-EM algorithm,” Ann Hum Genet. 68(Pt 2):165-177 (2004); A. D. Long and C. H. Langley C H, “The power of association studies to detect the contribution of candidate genetic loci to variation in complex traits,” Genome Research 9:720-731 (1999); A. Agresti, Categorical Data Analysis, John Wiley & Sons, Inc., N.Y. (1990); K. Lange, Mathematical and Statistical Methods for Genetic Analysis, Springer-Verlag New York, Inc., N.Y. (1997); The International HapMap Consortium, “The International HapMap Project,” Nature 426:789-796 (2003); The International HapMap Consortium, “A haplotype map of the human genome,” Nature 437:1299-1320 (2005); G. A. Thorisson, A. V. Smith, L. Krishnan, L. D. Stein, “The International HapMap Project Web Site,” Genome Research 15:1591-1593 (2005); G. McVean, C. C. A. Spencer, R. Chaix, “Perspectives on human genetic variation from the HapMap project,” PLoS Genetics 1(4):413-418 (2005); J. N. Hirschhorn, M. J. Daly, “Genome-wide association studies for common diseases and complex traits,” Nat Genet. 6:95-108 (2005); S. J. Schrodi, “A probabilistic approach to large-scale association scans: a semi-Bayesian method to detect disease-predisposing alleles,” SAGMB 4(1):31 (2005); W. Y. S. Wang, B. J. Barratt, D. G. Clayton, J. A. Todd, “Genome-wide association studies: theoretical and practical concerns,” Nat Rev Genet. 6:109-118 (2005); J. K. Pritchard, M. Przeworski, “Linkage disequilibrium in humans: models and data,” Am J Hum Genet. 69:1-14 (2001).

[0254] As discussed above, an aspect of the present invention relates to SNPs that are in LD with an interrogated SNP and which can also be used as valid markers for determining an individual's likelihood of benefiting from statin treatment, or whether an individual has an increased or decreased risk of having or developing VT. As used herein, the term “interrogated SNP” refers to SNPs that have been found to be associated with statin response, particularly for reducing VT risk, using genotyping results and analysis, or other appropriate experimental method as exemplified in the working examples described in this application. As used herein, the term “LD SNP” refers to a SNP that has been characterized as a SNP associated with statin response or an increased or decreased risk of VT due to their being in LD with the “interrogated SNP” under the methods of calculation described in the application. Below, applicants describe the methods of calculation with which one of ordinary skilled in the art may determine if a particular SNP is in LD with an interrogated SNP. The parameter r² is commonly used in the genetics art to characterize the extent of linkage disequilibrium between markers (Hudson, 2001). As used herein, the term “in LD with” refers to a particular SNP that is measured at above the threshold of a parameter such as r² with an interrogated SNP.

[0255] It is now common place to directly observe genetic variants in a sample of chromosomes obtained from a population. Suppose one has genotype data at two genetic markers located on the same chromosome, for the markers A and B. Further suppose that two alleles segregate at each of these two markers such that alleles A₁ and A₂ can be found at marker A and alleles B₁ and B₂ at marker B. Also assume that these two markers are on a human autosome. If one is to examine a specific individual and find that they are heterozygous at both markers, such that their two-marker genotype is A₁A₂B₁B₂, then there are two possible configurations: the individual in question could have the alleles A₁B₁ on one chromosome and A₂B₂ on the remaining chromosome; alternatively, the individual could have alleles A₁B₂ on one chromosome and A₂B₁ on the other. The arrangement of alleles on a chromosome is called a haplotype. In this illustration, the individual could have haplotypes A₁B₁/A₂B₂ or A₁B₂/A₂B₁ (see Hartl and Clark (1989) for a more complete description). The concept of linkage equilibrium relates the frequency of haplotypes to the allele frequencies.

[0256] Assume that a sample of individuals is selected from a larger population. Considering the two markers described above, each having two alleles, there are four possible haplotypes: A₁B₁, A₁B₂, A₂B₁ and A₂B₂. Denote the frequencies of these four haplotypes with the following notation.

P₁₁=freq(A₁B₁) (1)

P₁₂=freq(A₁B₂) (2)

P₂₁=freq(A₂B₁) (3)

P₂₂=freq(A₂B₂) (4)

The allele frequencies at the two markers are then the sum of different haplotype frequencies, it is straightforward to write down a similar set of equations relating single-marker allele frequencies to two-marker haplotype frequencies:

p₁=freq(A₁)=P₁₁+P₁₂ (5)

p₂=freq(A₂)=P₂₁+P₂₂ (6)

q₁=freq(B₁)=P₁₁+P₂₁ (7)

q₂=freq(B₂)=P₁₂+P₂₂ (8)

Note that the four haplotype frequencies and the allele frequencies at each marker must sum to a frequency of 1.

P₁₁+P₁₂+P₂₁+P₂₂=1 (9)

p₁+P₂=1 (10)

q₁+q₂=1 (11)

If there is no correlation between the alleles at the two markers, one would expect that the frequency of the haplotypes would be approximately the product of the composite alleles. Therefore,

P₁₁≈p₁q₁ (12)

P₁₂≈p₁q₂ (13)

P₂₁≈p₂q₁ (14)

P₂₂≈p₂q₂ (15)

These approximating equations (12)-(15) represent the concept of linkage equilibrium where there is independent assortment between the two markers—the alleles at the two markers occur together at random. These are represented as approximations because linkage equilibrium and linkage disequilibrium are concepts typically thought of as properties of a sample of chromosomes; and as such they are susceptible to stochastic fluctuations due to the sampling process. Empirically, many pairs of genetic markers will be in linkage equilibrium, but certainly not all pairs.

[0257] Having established the concept of linkage equilibrium above, applicants can now describe the concept of linkage disequilibrium (LD), which is the deviation from linkage equilibrium. Since the frequency of the A₁B₁ haplotype is approximately the product of the allele frequencies for A₁ and B₁ under the assumption of linkage equilibrium as stated mathematically in (12), a simple measure for the amount of departure from linkage equilibrium is the difference in these two quantities, D,

D=P₁₁=P₁q₁ (16)

D=0 indicates perfect linkage equilibrium. Substantial departures from D=0 indicates LD in the sample of chromosomes examined. Many properties of D are discussed in Lewontin (1964) including the maximum and minimum values that D can take. Mathematically, using basic algebra, it can be shown that D can also be written solely in terms of haplotypes:

D=P₁₁P₂₂−P₁₂P₂₁ (17)

If one transforms D by squaring it and subsequently dividing by the product of the allele frequencies of A₁, A₂, B₁ and B₂, the resulting quantity, called r², is equivalent to the square of the Pearson's correlation coefficient commonly used in statistics (e.g., Hoel, 1954).

$${r}^{2} = \frac{{D}^{2}}{{p}_{1} {p}_{2} {q}_{1} {q}_{2}} \qquad ( 18 )$$

[0258] As with D, values of r² close to 0 indicate linkage equilibrium between the two markers examined in the sample set. As values of r² increase, the two markers are said to be in linkage disequilibrium. The range of values that r² can take are from 0 to 1. r²=1 when there is a perfect correlation between the alleles at the two markers.

[0259] In addition, the quantities discussed above are sample-specific. And as such, it is necessary to formulate notation specific to the samples studied. In the approach discussed here, three types of samples are of primary interest: (i) a sample of chromosomes from individuals affected by a disease-related phenotype (cases), (ii) a sample of chromosomes obtained from individuals not affected by the disease-related phenotype (controls), and (iii) a standard sample set used for the construction of haplotypes and calculation pairwise linkage disequilibrium. For the allele frequencies used in the development of the method described below, an additional subscript will be added to denote either the case or control sample sets.

p_{1,cs}=freq(A₁ in cases) (19)

p_{2,cs}=freq(A₂ in cases) (20)

q_{1,cs}=freq(B₁ in cases) (21)

q_{2,cs}=freq(B₂ in cases) (22)

Similarly,

p_{1,ct}=freq(A₁ in controls) (23)

P_{2,ct}=freq(A₂ in controls) (24)

q_{1,ct}=freq(B₁ in controls) (25)

q_{2,ct}=freq(B₂ in controls) (26)

[0260] As a well-accepted sample set is necessary for robust linkage disequilibrium calculations, data obtained from the International HapMap project (The International HapMap Consortium 2003, 2005; Thorisson et al, 2005; McVean et al, 2005) can be used for the calculation of pairwise r² values. Indeed, the samples genotyped for the International HapMap Project were selected to be representative examples from various human sub-populations with sufficient numbers of chromosomes examined to draw meaningful and robust conclusions from the patterns of genetic variation observed. The International HapMap project website (hapmap.org) contains a description of the project, methods utilized and samples examined. It is useful to examine empirical data to get a sense of the patterns present in such data.

[0261] Haplotype frequencies were explicit arguments in equation (18) above. However, knowing the 2-marker haplotype frequencies requires that phase to be determined for doubly heterozygous samples. When phase is unknown in the data examined, various algorithms can be used to infer phase from the genotype data. This issue was discussed earlier where the doubly heterozygous individual with a 2-SNP genotype of A₁A₂B₁B₂ could have one of two different sets of chromosomes: A₁B₁/A₂B₂ or B₂/A₂B₁. One such algorithm to estimate haplotype frequencies is the expectation-maximization (EM) algorithm first formalized by Dempster et al. (1977). This algorithm is often used in genetics to infer haplotype frequencies from genotype data (e.g. Excoffier and Slatkin (1995); Tregouet et al. (2004)). It should be noted that for the two-SNP case explored here, EM algorithms have very little error provided that the allele frequencies and sample sizes are not too small. The impact on r² values is typically negligible.

[0262] As correlated genetic markers share information, interrogation of SNP markers in LD with a disease-associated SNP marker can also have sufficient power to detect disease association (Long and Langley (1999)). The relationship between the power to directly find disease-associated alleles and the power to indirectly detect disease-association was investigated by Pritchard and Przeworski (2001). In a straight-forward derivation, it can be shown that the power to detect disease association indirectly at a marker locus in linkage disequilibrium with a disease-association locus is approximately the same as the power to detect disease-association directly at the disease-association locus if the sample size is increased by a factor of

$$\frac{1}{{r}^{2}}$$

(the reciprocal of equation 18) at the marker in comparison with the disease-association locus.

[0263] Therefore, if one calculated the power to detect disease-association indirectly with an experiment having N samples, then equivalent power to directly detect disease-association (at the actual disease-susceptibility locus) would necessitate an experiment using approximately r²N samples. This elementary relationship between power, sample size and linkage disequilibrium can be used to derive an r² threshold value useful in determining whether or not genotyping markers in linkage disequilibrium with a SNP marker directly associated with disease status has enough power to indirectly detect disease-association.

[0264] To commence a derivation of the power to detect disease-associated markers through an indirect process, define the effective chromosomal sample size as

$$N = \frac{4 {N}_{cs} {N}_{ct}}{{N}_{cs} + {N}_{ct}} ; \qquad ( 27 )$$

where N_{cs} and N_{ct} are the numbers of diploid cases and controls, respectively. This is necessary to handle situations where the numbers of cases and controls are not equivalent. For equal case and control sample sizes, N_{cs}=N_{ct}=N, the value of the effective number of chromosomes is simply n=2N—as expected. Let power be calculated for a significance level α (such that traditional P-values below α will be deemed statistically significant). Define the standard Gaussian distribution function as Φ(). Mathematically,

$$Φ ( x ) = \frac{1}{\sqrt{2 π}} {\int }_{- ∞}^{x} {e}^{- \frac{{θ}^{2}}{2}} d θ \qquad ( 28 )$$

Alternatively, the following error function notation (Erf) may also be used,

$$Φ ( x ) = \frac{1}{2} [ 1 + Erf ( \frac{x}{\sqrt{2}} ) ] \qquad ( 29 )$$

[0265] For example, Φ(1.644854)=0.95. The value of r² may be derived to yield a pre-specified minimum amount of power to detect disease association though indirect interrogation. Noting that the LD SNP marker could be the one that is carrying the disease-association allele, therefore that this approach constitutes a lower-bound model where all indirect power results are expected to be at least as large as those interrogated.

[0266] Denote by β the error rate for not detecting truly disease-associated markers. Therefore, 1−β is the classical definition of statistical power. Substituting the Pritchard-Pzreworski result into the sample size, the power to detect disease association at a significance level of α is given by the approximation

$$1 - β ≅ Φ [ \frac{\vert {q}_{1 , cs} - {q}_{1 , ct} \vert}{\sqrt{\frac{{q}_{1 , cs} ( 1 - {q}_{1 , cs} ) + {q}_{1 , ct} ( 1 - {q}_{1 , ct} )}{{r}^{2} n}}} - {Z}_{1 - α / 2} ] ; \qquad ( 30 )$$

where Zᵤ is the inverse of the standard normal cumulative distribution evaluated at u (uε(0,1)). Zᵤ=Φ⁻¹(u), where Φ(Φ⁻¹(u))=Φ⁻¹(Φ(u))=u. For example, setting α=0.05, and therefore 1−α/2=0.975, one obtains Z_{0.975}=1.95996. Next, setting power equal to a threshold of a minimum power of T,

$$T = Φ [ \frac{\vert {q}_{1 , cs} - {q}_{1 , ct} \vert}{\sqrt{\frac{{q}_{1 , cs} ( 1 - {q}_{1 , cs} ) + {q}_{1 , ct} ( 1 - {q}_{1 , ct} )}{{r}^{2} n}}} - {Z}_{1 - α / 2} ] \qquad ( 31 )$$

and solving for r², the following threshold r² is obtained:

$$\begin{matrix}{r}_{T}^{2} = {\frac{{q}_{1 , cs} ( 1 - {q}_{1 , cs} ) + {q}_{1 , ct} ( 1 - {q}_{1 , ct} )}{{n ( {q}_{1 , cs} - {q}_{1 , ct} )}^{2}} [ {Φ}^{- 1} ( T ) + {Z}_{1 - α / 2} ]}^{2} \\ Or , & ( 32 ) \\ {r}_{T}^{2} = \frac{{( {Z}_{T} + {Z}_{1 - α / 2} )}^{2}}{n} [ \frac{{q}_{1 , cs} - {( {q}_{1 , cs} )}^{2} + {q}_{1 , ct} - {( {q}_{1 , ct} )}^{2}}{{( {q}_{1 , cs} - {q}_{1 , ct} )}^{2}} ] & ( 33 )\end{matrix}$$

[0267] Suppose that r² is calculated between an interrogated SNP and a number of other SNPs with varying levels of LD with the interrogated SNP. The threshold value r_{T}² is the minimum value of linkage disequilibrium between the interrogated SNP and the potential LD SNPs such that the LD SNP still retains a power greater or equal to T for detecting disease-association. For example, suppose that SNP rs200 is genotyped in a case-control disease-association study and it is found to be associated with a disease phenotype. Further suppose that the minor allele frequency in 1,000 case chromosomes was found to be 16% in contrast with a minor allele frequency of 10% in 1,000 control chromosomes. Given those measurements one could have predicted, prior to the experiment, that the power to detect disease association at a significance level of 0.05 was quite high—approximately 98% using a test of allelic association. Applying equation (32) one can calculate a minimum value of r² to indirectly assess disease association assuming that the minor allele at SNP rs200 is truly disease-predisposing for a threshold level of power. If one sets the threshold level of power to be 80%, then r_{T}²=0.489 given the same significance level and chromosome numbers as above. Hence, any SNP with a pairwise r² value with rs200 greater than 0.489 is expected to have greater than 80% power to detect the disease association. Further, this is assuming the conservative model where the LD SNP is disease-associated only through linkage disequilibrium with the interrogated SNP rs200.

[0268] Imputation

[0269] Genotypes of SNPs can be imputed without actually having to be directly genotyped (referred to as “imputation”), by using known haplotype information. Imputation is a process to provide “missing” data, either missing individual genotypes or missing SNPs and concomitant genotypes, which have not been directly genotyped (i.e., assayed). Imputation is particularly useful for identifying disease associations for specific ungenotyped SNPs by inferring the missing genotypes to these ungenotyped SNPs. Although the process uses similar information to LD, since the phasing and imputation process uses information from multiple SNPs at the same time, the phased haplotype, it is able to infer the genotype and achieve high identifiable accuracy. Genotype information (such as from the HapMap project by The International HapMap Consortium) can be used to infer haplotype phase and impute genotypes for SNPs that are not directly genotyped in a given individual or sample set (such as for a disease association study). In general, imputation uses a reference dataset in which the genotypes of potential SNPs that are to be tested for disease association have been determined in multiple individuals (such as in HapMap); the individuals in the reference dataset are then haplotype phased. This phasing can be done with independent programs such as fastPHASE (Sheet and Stephens, Am J Hum Genet (2006) 76: 629-644) or a combination program such as BEAGLE which does both the phasing and the imputation. The reference phased haplotypes and process can be checked using the children of the HapMap individual parents, among other mechanisms. Once the reference phased haplotypes have been created, the imputation of additional individuals for SNPs genotyped or complete sets of SNPs that have not been directly genotyped can then proceed. The HapMap dataset is particularly useful as the reference dataset, however other datasets can be used. Since the imputation creates new concommitant phased haplotypes for individuals in the association study and these contain other SNPs within the genomic region, these ungenotyped but imputed SNPs can also be tested for disease assocations (or other traits). Certain exemplary methods for haplotype phase inference and imputation of missing genotypes utilize the BEAGLE genetic analysis program, (Browning, Hum Genet (2008) 124:439-450).

[0270] Thus, SNPs for which genotypes are imputed can be tested for association with a disease or other trait even though these SNPs are not directly genotyped. The SNPs for which genotypes are imputed have genotype data available in the reference dataset, e.g. HapMap individuals, but they are not directly genotyped in a particular individual or sample set (such as in a particular disease association study).

[0271] In addition to using a reference dataset (e.g., HapMap) to impute genotypes of SNPs that are not directly genotyped in a study, imputation can provide genotypes of SNPs that were directly genotyped in a study but for which the genotypes are missing, in some or most of the individuals, for some reason, such as because they failed to pass quality control. Imputation can also be used to combine genotyping results from multiple studies in which different sets of SNPs were genotyped to construct a complete meta-analysis. For example, genotyped and imputed genotyped SNP results from multiple different studies can be combined, and the overlapping SNP genotypes (e.g., genotyped in one study, imputed in another study or imputed in both or genotyped in both) can be analyzed across all of the studies (Browning, Hum Genet (2008) 124:439-450).

[0272] For a review of imputation (as well as the BEAGLE program), see Browning, “Missing data imputation and haplotype phase inference for genome-wide association studies”, Hum Genet (2008) 124:439-450 and Browning et al. “A unified approach to genotype imputation and haplotype-phase inference for large data sets of trios and unrelated individuals”, Am J Hum Genet. (2009) February; 84(2):210-23, each of which is incorporated herein by reference in its entirety.

[0273] The contribution or association of particular SNPs with statin response or disease phenotypes, such as VT, enables the SNPs of the present invention to be used to develop superior diagnostic tests capable of identifying individuals who express a detectable trait, such as reduced risk for VT in response to statin treatment, as the result of a specific genotype, or individuals whose genotype places them at an increased or decreased risk of developing a detectable trait at a subsequent time as compared to individuals who do not have that genotype. As described herein, diagnostics may be based on a single SNP or a group of SNPs. Combined detection of a plurality of SNPs (for example, 2, 3, 4, 5, 6, 7, 8, 9, 10, 11, 12, 13, 14, 15, 16, 17, 18, 19, 20, 24, 25, 30, 32, 48, 50, 64, 96, 100, or any other number in-between, or more, of the SNPs provided in Table 1 and/or Table 2) typically increases the probability of an accurate diagnosis. For example, the presence of a single SNP known to correlate with VT might indicate a probability of 20% that an individual has or is at risk of developing VT, whereas detection of five SNPs, each of which correlates with VT, might indicate a probability of 80% that an individual has or is at risk of developing VT. To further increase the accuracy of diagnosis or predisposition screening, analysis of the SNPs of the present invention can be combined with that of other polymorphisms or other risk factors of VT, such as disease symptoms, pathological characteristics, family history, diet, environmental factors, or lifestyle factors.

[0274] It will be understood by practitioners skilled in the treatment or diagnosis of VT that the present invention generally does not intend to provide an absolute identification of individuals who benefit from statin treatment or individuals who are at risk (or less at risk) of developing VT, but rather to indicate a certain increased (or decreased) degree or likelihood of responding to statin therapy or developing VT based on statistically significant association results. However, this information is extremely valuable as it can be used to, for example, encourage individuals to comply with their statin regimens as prescribed by their doctors (even though the benefit of maintaining statin therapy may not be overtly apparent, which often leads to lack of compliance with prescribed statin treatment), to initiate preventive treatments or to allow an individual carrying one or more significant SNPs or SNP haplotypes to foresee warning signs such as minor clinical symptoms, or to have regularly scheduled physical exams to monitor for appearance of a condition in order to identify and begin treatment of the condition at an early stage. Particularly with diseases that are extremely debilitating or fatal if not treated on time, the knowledge of a potential predisposition, even if this predisposition is not absolute, would likely contribute in a very significant manner to treatment efficacy.

[0275] The diagnostic techniques of the present invention may employ a variety of methodologies to determine whether a test subject has a SNP or combination of SNPs associated with an increased or decreased risk of developing a detectable trait or whether the individual suffers from a detectable trait as a result of a particular polymorphism/mutation, including, for example, methods which enable the analysis of individual chromosomes for haplotyping, family studies, single sperm DNA analysis, or somatic hybrids. The trait analyzed using the diagnostics of the invention may be any detectable trait that is commonly observed in pathologies and disorders related to VT or drug response.

[0276] Another aspect of the present invention relates to a method of determining whether an individual is at risk (or less at risk) of developing one or more traits or whether an individual expresses one or more traits as a consequence of possessing a particular trait-causing or trait-influencing allele. These methods generally involve obtaining a nucleic acid sample from an individual and assaying the nucleic acid sample to determine which nucleotide(s) is/are present at one or more SNP positions, wherein the assayed nucleotide(s) is/are indicative of an increased or decreased risk of developing the trait or indicative that the individual expresses the trait as a result of possessing a particular trait-causing or trait-influencing allele.

[0277] In another embodiment, the SNP detection reagents of the present invention are used to determine whether an individual has one or more SNP allele(s) affecting the level (e.g., the concentration of mRNA or protein in a sample, etc.) or pattern (e.g., the kinetics of expression, rate of decomposition, stability profile, Km, Vmax, etc.) of gene expression (collectively, the “gene response” of a cell or bodily fluid). Such a determination can be accomplished by screening for mRNA or protein expression (e.g., by using nucleic acid arrays, RT-PCR, TaqMan assays, or mass spectrometry), identifying genes having altered expression in an individual, genotyping SNPs disclosed in Table 1 and/or Table 2 that could affect the expression of the genes having altered expression (e.g., SNPs that are in and/or around the gene(s) having altered expression, SNPs in regulatory/control regions, SNPs in and/or around other genes that are involved in pathways that could affect the expression of the gene(s) having altered expression, or all SNPs could be genotyped), and correlating SNP genotypes with altered gene expression. In this manner, specific SNP alleles at particular SNP sites can be identified that affect gene expression.

[0278] Therapeutics, Pharmacogenomics, and Drug Development

[0279] Therapeutic Methods and Compositions

[0280] In certain aspects of the invention, there are provided methods of assaying (i.e., testing) one or more SNPs provided by the present invention in an individual's nucleic acids, and administering a therapeutic or preventive agent to the individual based on the allele(s) present at the SNP(s) having indicated that the individual can benefit from the therapeutic or preventive agent.

[0281] In further aspects of the invention, there are provided methods of assaying one or more SNPs provided by the present invention in an individual's nucleic acids, and administering a diagnostic agent (e.g., an imaging agent), or otherwise carrying out further diagnostic procedures on the individual, based on the allele(s) present at the SNP(s) having indicated that the diagnostic agents or diagnostics procedures are justified in the individual.

[0282] In yet other aspects of the invention, there is provided a pharmaceutical pack comprising a therapeutic agent (e.g., a small molecule drug, antibody, peptide, antisense or RNAi nucleic acid molecule, etc.) and a set of instructions for administration of the therapeutic agent to an individual who has been tested for one or more SNPs provided by the present invention.

[0283] Pharmacogenomics

[0284] The present invention provides methods for assessing the pharmacogenomics of a subject harboring particular SNP alleles or haplotypes to a particular therapeutic agent or pharmaceutical compound, or to a class of such compounds. Pharmacogenomics deals with the roles which clinically significant hereditary variations (e.g., SNPs) play in the response to drugs due to altered drug disposition and/or abnormal action in affected persons. See, e.g., Roses, Nature 405, 857-865 (2000); Gould Rothberg, Nature Biotechnology 19, 209-211 (2001); Eichelbaum, Clin Exp Pharmacol Physiol 23(10-11):983-985 (1996); and Linder, Clin Chem 43(2):254-266 (1997). The clinical outcomes of these variations can result in severe toxicity of therapeutic drugs in certain individuals or therapeutic failure of drugs in certain individuals as a result of individual variation in metabolism. Thus, the SNP genotype of an individual can determine the way a therapeutic compound acts on the body or the way the body metabolizes the compound. For example, SNPs in drug metabolizing enzymes can affect the activity of these enzymes, which in turn can affect both the intensity and duration of drug action, as well as drug metabolism and clearance.

[0285] The discovery of SNPs in drug metabolizing enzymes, drug transporters, proteins for pharmaceutical agents, and other drug targets has explained why some patients do not obtain the expected drug effects, show an exaggerated drug effect, or experience serious toxicity from standard drug dosages. SNPs can be expressed in the phenotype of the extensive metabolizer and in the phenotype of the poor metabolizer. Accordingly, SNPs may lead to allelic variants of a protein in which one or more of the protein functions in one population are different from those in another population. SNPs and the encoded variant peptides thus provide targets to ascertain a genetic predisposition that can affect treatment modality. For example, in a ligand-based treatment, SNPs may give rise to amino terminal extracellular domains and/or other ligand-binding regions of a receptor that are more or less active in ligand binding, thereby affecting subsequent protein activation. Accordingly, ligand dosage would necessarily be modified to maximize the therapeutic effect within a given population containing particular SNP alleles or haplotypes.

[0286] As an alternative to genotyping, specific variant proteins containing variant amino acid sequences encoded by alternative SNP alleles could be identified. Thus, pharmacogenomic characterization of an individual permits the selection of effective compounds and effective dosages of such compounds for prophylactic or therapeutic uses based on the individual's SNP genotype, thereby enhancing and optimizing the effectiveness of the therapy. Furthermore, the production of recombinant cells and transgenic animals containing particular SNPs/haplotypes allow effective clinical design and testing of treatment compounds and dosage regimens. For example, transgenic animals can be produced that differ only in specific SNP alleles in a gene that is orthologous to a human disease susceptibility gene.

[0287] Pharmacogenomic uses of the SNPs of the present invention provide several significant advantages for patient care, particularly in predicting an individual's responsiveness to statin treatment (particularly for reducing the risk of VT) and in predicting an individual's predisposition to VT. Pharmacogenomic characterization of an individual, based on an individual's SNP genotype, can identify those individuals unlikely to respond to treatment with a particular medication and thereby allows physicians to avoid prescribing the ineffective medication to those individuals. On the other hand, SNP genotyping of an individual may enable physicians to select the appropriate medication and dosage regimen that will be most effective based on an individual's SNP genotype. This information increases a physician's confidence in prescribing medications and motivates patients to comply with their drug regimens. Furthermore, pharmacogenomics may identify patients predisposed to toxicity and adverse reactions to particular drugs or drug dosages. Adverse drug reactions lead to more than 100,000 avoidable deaths per year in the United States alone and therefore represent a significant cause of hospitalization and death, as well as a significant economic burden on the healthcare system (Pfost et al., Trends in Biotechnology, August 2000.). Thus, pharmacogenomics based on the SNPs disclosed herein has the potential to both save lives and reduce healthcare costs substantially.

[0288] Pharmacogenomics in general is discussed further in Rose et al., “Pharmacogenetic analysis of clinically relevant genetic polymorphisms,” Methods Mol Med 85:225-37 (2003). Pharmacogenomics as it relates to Alzheimer's disease and other neurodegenerative disorders is discussed in Cacabelos, “Pharmacogenomics for the treatment of dementia,” Ann Med 34(5):357-79 (2002); Maimone et al., “Pharmacogenomics of neurodegenerative diseases,” Eur J Pharmacol 413(1):11-29 (February 2001); and Poirier, “Apolipoprotein E: a pharmacogenetic target for the treatment of Alzheimer's disease,” Mol Diagn 4(4):335-41 (Dec. 1999). Pharmacogenomics as it relates to cardiovascular disorders is discussed in Siest et al., “Pharmacogenomics of drugs affecting the cardiovascular system,” Clin Chem Lab Med 41(4):590-9 (April 2003); Mukherjee et al., “Pharmacogenomics in cardiovascular diseases,” Prog Cardiovasc Dis 44(6):479-98 (May-June 2002); and Mooser et al., “Cardiovascular pharmacogenetics in the SNP era,” J Thromb Haemost 1(7):1398-402 (July 2003). Pharmacogenomics as it relates to cancer is discussed in McLeod et al., “Cancer pharmacogenomics: SNPs, chips, and the individual patient,” Cancer Invest 21(4):630-40 (2003); and Watters et al., “Cancer pharmacogenomics: current and future applications,” Biochim Biophys Acta 1603(2):99-111 (March 2003).

[0289] Clinical Trials

[0290] In certain aspects of the invention, there are provided methods of using the SNPs disclosed herein to identify or stratify patient populations for clinical trials of a therapeutic, preventive, or diagnostic agent.

[0291] For instance, an aspect of the present invention includes selecting individuals for clinical trials based on their SNP genotype, such as selecting individuals for inclusion in a clinical trial and/or assigning individuals to a particular group within a clinical trial (e.g., an “arm” or “cohort” of the trial). For example, individuals with SNP genotypes that indicate that they are likely to positively respond to a drug can be included in the trials, whereas those individuals whose SNP genotypes indicate that they are less likely to or would not respond to the drug, or who are at risk for suffering toxic effects or other adverse reactions, can be excluded from the clinical trials. This not only can improve the safety of clinical trials, but also can enhance the chances that the trial will demonstrate statistically significant efficacy. Further, one can stratify a prospective trial with patients with different SNP variants to determine the impact of differential drug treatment.

[0292] Thus, certain embodiments of the invention provide methods for conducting a clinical trial of a therapeutic agent in which a human is selected for inclusion in the clinical trial and/or assigned to a particular group within a clinical trial based on the presence or absence of one or more SNPs disclosed herein. In certain embodiments, the therapeutic agent is a statin.

[0293] In certain exemplary embodiments, SNPs of the invention can be used to select individuals who are unlikely to respond positively to a particular therapeutic agent (or class of therapeutic agents) based on their SNP genotype(s) to participate in a clinical trial of another type of drug that may benefit them. Thus, in certain embodiments, the SNPs of the invention can be used to identify patient populations who do not adequately respond to current treatments and are therefore in need of new therapies. This not only benefits the patients themselves, but also benefits organizations such as pharmaceutical companies by enabling the identification of populations that represent markets for new drugs, and enables the efficacy of these new drugs to be tested during clinical trials directly in individuals within these markets.

[0294] The SNP-containing nucleic acid molecules of the present invention are also useful for monitoring the effectiveness of modulating compounds on the expression or activity of a variant gene, or encoded product, particularly in a treatment regimen or in clinical trials. Thus, the gene expression pattern can serve as an indicator for the continuing effectiveness of treatment with the compound, particularly with compounds to which a patient can develop resistance, as well as an indicator for toxicities. The gene expression pattern can also serve as a marker indicative of a physiological response of the affected cells to the compound. Accordingly, such monitoring would allow either increased administration of the compound or the administration of alternative compounds to which the patient has not become resistant.

[0295] Furthermore, the SNPs of the present invention may have utility in determining why certain previously developed drugs performed poorly in clinical trials and may help identify a subset of the population that would benefit from a drug that had previously performed poorly in clinical trials, thereby “rescuing” previously developed drugs, and enabling the drug to be made available to a particular patient population (e.g., particular VT patients) that can benefit from it.

[0296] Identification, Screening, and Use of Therapeutic Agents

[0297] The SNPs of the present invention also can be used to identify novel therapeutic targets for VT. For example, genes containing the disease-associated variants (“variant genes”) or their products, as well as genes or their products that are directly or indirectly regulated by or interacting with these variant genes or their products, can be targeted for the development of therapeutics that, for example, treat the disease or prevent or delay disease onset. The therapeutics may be composed of, for example, small molecules, proteins, protein fragments or peptides, antibodies, nucleic acids, or their derivatives or mimetics which modulate the functions or levels of the target genes or gene products.

[0298] The invention further provides methods for identifying a compound or agent that can be used to treat VT. The SNPs disclosed herein are useful as targets for the identification and/or development of therapeutic agents. A method for identifying a therapeutic agent or compound typically includes assaying the ability of the agent or compound to modulate the activity and/or expression of a SNP-containing nucleic acid or the encoded product and thus identifying an agent or a compound that can be used to treat a disorder characterized by undesired activity or expression of the SNP-containing nucleic acid or the encoded product. The assays can be performed in cell-based and cell-free systems. Cell-based assays can include cells naturally expressing the nucleic acid molecules of interest or recombinant cells genetically engineered to express certain nucleic acid molecules.

[0299] Variant gene expression in a VT patient can include, for example, either expression of a SNP-containing nucleic acid sequence (for instance, a gene that contains a SNP can be transcribed into an mRNA transcript molecule containing the SNP, which can in turn be translated into a variant protein) or altered expression of a normal/wild-type nucleic acid sequence due to one or more SNPs (for instance, a regulatory/control region can contain a SNP that affects the level or pattern of expression of a normal transcript).

[0300] Assays for variant gene expression can involve direct assays of nucleic acid levels (e.g., mRNA levels), expressed protein levels, or of collateral compounds involved in a signal pathway. Further, the expression of genes that are up- or down-regulated in response to the signal pathway can also be assayed. In this embodiment, the regulatory regions of these genes can be operably linked to a reporter gene such as luciferase.

[0301] Modulators of variant gene expression can be identified in a method wherein, for example, a cell is contacted with a candidate compound/agent and the expression of mRNA determined. The level of expression of mRNA in the presence of the candidate compound is compared to the level of expression of mRNA in the absence of the candidate compound. The candidate compound can then be identified as a modulator of variant gene expression based on this comparison and be used to treat a disorder such as VT that is characterized by variant gene expression (e.g., either expression of a SNP-containing nucleic acid or altered expression of a normal/wild-type nucleic acid molecule due to one or more SNPs that affect expression of the nucleic acid molecule) due to one or more SNPs of the present invention. When expression of mRNA is statistically significantly greater in the presence of the candidate compound than in its absence, the candidate compound is identified as a stimulator of nucleic acid expression. When nucleic acid expression is statistically significantly less in the presence of the candidate compound than in its absence, the candidate compound is identified as an inhibitor of nucleic acid expression.

[0302] The invention further provides methods of treatment, with the SNP or associated nucleic acid domain (e.g., catalytic domain, ligand/substrate-binding domain, regulatory/control region, etc.) or gene, or the encoded mRNA transcript, as a target, using a compound identified through drug screening as a gene modulator to modulate variant nucleic acid expression. Modulation can include either up-regulation (i.e., activation or agonization) or down-regulation (i.e., suppression or antagonization) of nucleic acid expression.

[0303] Expression of mRNA transcripts and encoded proteins, either wild type or variant, may be altered in individuals with a particular SNP allele in a regulatory/control element, such as a promoter or transcription factor binding domain, that regulates expression. In this situation, methods of treatment and compounds can be identified, as discussed herein, that regulate or overcome the variant regulatory/control element, thereby generating normal, or healthy, expression levels of either the wild type or variant protein.

[0304] Pharmaceutical Compositions and Administration Thereof

[0305] Any of the statin response-associated proteins, and encoding nucleic acid molecules, disclosed herein can be used as therapeutic targets (or directly used themselves as therapeutic compounds) for treating or preventing VT, and the present disclosure enables therapeutic compounds (e.g., small molecules, antibodies, therapeutic proteins, RNAi and antisense molecules, etc.) to be developed that target (or are comprised of) any of these therapeutic targets.

[0306] In general, a therapeutic compound will be administered in a therapeutically effective amount by any of the accepted modes of administration for agents that serve similar utilities. The actual amount of the therapeutic compound of this invention, i.e., the active ingredient, will depend upon numerous factors such as the severity of the disease to be treated, the age and relative health of the subject, the potency of the compound used, the route and form of administration, and other factors.

[0307] Therapeutically effective amounts of therapeutic compounds may range from, for example, approximately 0.01-50 mg per kilogram body weight of the recipient per day; preferably about 0.1-20 mg/kg/day. Thus, as an example, for administration to a 70-kg person, the dosage range would most preferably be about 7 mg to 1.4 g per day.

[0308] In general, therapeutic compounds will be administered as pharmaceutical compositions by any one of the following routes: oral, systemic (e.g., transdermal, intranasal, or by suppository), or parenteral (e.g., intramuscular, intravenous, or subcutaneous) administration. The preferred manner of administration is oral or parenteral using a convenient daily dosage regimen, which can be adjusted according to the degree of affliction. Oral compositions can take the form of tablets, pills, capsules, semisolids, powders, sustained release formulations, solutions, suspensions, elixirs, aerosols, or any other appropriate compositions.

[0309] The choice of formulation depends on various factors such as the mode of drug administration (e.g., for oral administration, formulations in the form of tablets, pills, or capsules are preferred) and the bioavailability of the drug substance. Recently, pharmaceutical formulations have been developed especially for drugs that show poor bioavailability based upon the principle that bioavailability can be increased by increasing the surface area, i.e., decreasing particle size. For example, U.S. Pat. No. 4,107,288 describes a pharmaceutical formulation having particles in the size range from 10 to 1,000 nm in which the active material is supported on a cross-linked matrix of macromolecules. U.S. Pat. No. 5,145,684 describes the production of a pharmaceutical formulation in which the drug substance is pulverized to nanoparticles (average particle size of 400 nm) in the presence of a surface modifier and then dispersed in a liquid medium to give a pharmaceutical formulation that exhibits remarkably high bioavailability.

[0310] Pharmaceutical compositions are comprised of, in general, a therapeutic compound in combination with at least one pharmaceutically acceptable excipient. Acceptable excipients are non-toxic, aid administration, and do not adversely affect the therapeutic benefit of the therapeutic compound. Such excipients may be any solid, liquid, semi-solid or, in the case of an aerosol composition, gaseous excipient that is generally available to one skilled in the art.

[0311] Solid pharmaceutical excipients include starch, cellulose, talc, glucose, lactose, sucrose, gelatin, malt, rice, flour, chalk, silica gel, magnesium stearate, sodium stearate, glycerol monostearate, sodium chloride, dried skim milk and the like. Liquid and semisolid excipients may be selected from glycerol, propylene glycol, water, ethanol and various oils, including those of petroleum, animal, vegetable or synthetic origin, e.g., peanut oil, soybean oil, mineral oil, sesame oil, etc. Preferred liquid carriers, particularly for injectable solutions, include water, saline, aqueous dextrose, and glycols.

[0312] Compressed gases may be used to disperse a compound of this invention in aerosol form. Inert gases suitable for this purpose are nitrogen, carbon dioxide, etc.

[0313] Other suitable pharmaceutical excipients and their formulations are described in Remington's Pharmaceutical Sciences 18^{th} ed., E. W. Martin, ed., Mack Publishing Company (1990).

[0314] The amount of the therapeutic compound in a formulation can vary within the full range employed by those skilled in the art. Typically, the formulation will contain, on a weight percent (wt %) basis, from about 0.01-99.99 wt % of the therapeutic compound based on the total formulation, with the balance being one or more suitable pharmaceutical excipients. Preferably, the compound is present at a level of about 1-80% wt.

[0315] Therapeutic compounds can be administered alone or in combination with other therapeutic compounds or in combination with one or more other active ingredient(s). For example, an inhibitor or stimulator of a VT-associated protein can be administered in combination with another agent that inhibits or stimulates the activity of the same or a different VT-associated protein to thereby counteract the effects of VT.

[0316] For further information regarding pharmacology, see Current Protocols in Pharmacology, John Wiley & Sons, Inc., N.Y.

[0317] Nucleic Acid-Based Therapeutic Agents

[0318] The SNP-containing nucleic acid molecules disclosed herein, and their complementary nucleic acid molecules, may be used as antisense constructs to control gene expression in cells, tissues, and organisms. Antisense technology is well established in the art and extensively reviewed in Antisense Drug Technology: Principles, Strategies, and Applications, Crooke, ed., Marcel Dekker, Inc., N.Y. (2001). An antisense nucleic acid molecule is generally designed to be complementary to a region of mRNA expressed by a gene so that the antisense molecule hybridizes to the mRNA and thereby blocks translation of mRNA into protein. Various classes of antisense oligonucleotides are used in the art, two of which are cleavers and blockers. Cleavers, by binding to target RNAs, activate intracellular nucleases (e.g., RNaseH or RNase L) that cleave the target RNA. Blockers, which also bind to target RNAs, inhibit protein translation through steric hindrance of ribosomes. Exemplary blockers include peptide nucleic acids, morpholinos, locked nucleic acids, and methylphosphonates. See, e.g., Thompson, Drug Discovery Today 7(17): 912-917 (2002). Antisense oligonucleotides are directly useful as therapeutic agents, and are also useful for determining and validating gene function (e.g., in gene knock-out or knock-down experiments).

[0319] Antisense technology is further reviewed in: Lavery et al., “Antisense and RNAi: powerful tools in drug target discovery and validation,” Curr Opin Drug Discov Devel 6(4):561-9 (July 2003); Stephens et al., “Antisense oligonucleotide therapy in cancer,” Curr Opin Mol Ther 5(2):118-22 (April 2003); Kurreck, “Antisense technologies. Improvement through novel chemical modifications,” Eur J Biochem 270(8):1628-44 (April 2003); Dias et al., “Antisense oligonucleotides: basic concepts and mechanisms,” Mol Cancer Ther 1(5):347-55 (March 2002); Chen, “Clinical development of antisense oligonucleotides as anti-cancer therapeutics,” Methods Mol Med 75:621-36 (2003); Wang et al., “Antisense anticancer oligonucleotide therapeutics,” Curr Cancer Drug Targets 1(3):177-96 (November 2001); and Bennett, “Efficiency of antisense oligonucleotide drug discovery,” Antisense Nucleic Acid Drug Dev 12(3):215-24 (June 2002).

[0320] The SNPs of the present invention are particularly useful for designing antisense reagents that are specific for particular nucleic acid variants. Based on the SNP information disclosed herein, antisense oligonucleotides can be produced that specifically target mRNA molecules that contain one or more particular SNP nucleotides. In this manner, expression of mRNA molecules that contain one or more undesired polymorphisms (e.g., SNP nucleotides that lead to a defective protein such as an amino acid substitution in a catalytic domain) can be inhibited or completely blocked. Thus, antisense oligonucleotides can be used to specifically bind a particular polymorphic form (e.g., a SNP allele that encodes a defective protein), thereby inhibiting translation of this form, but which do not bind an alternative polymorphic form (e.g., an alternative SNP nucleotide that encodes a protein having normal function).

[0321] Antisense molecules can be used to inactivate mRNA in order to inhibit gene expression and production of defective proteins. Accordingly, these molecules can be used to treat a disorder, such as VT, characterized by abnormal or undesired gene expression or expression of certain defective proteins. This technique can involve cleavage by means of ribozymes containing nucleotide sequences complementary to one or more regions in the mRNA that attenuate the ability of the mRNA to be translated. Possible mRNA regions include, for example, protein-coding regions and particularly protein-coding regions corresponding to catalytic activities, substrate/ligand binding, or other functional activities of a protein.

[0322] The SNPs of the present invention are also useful for designing RNA interference reagents that specifically target nucleic acid molecules having particular SNP variants. RNA interference (RNAi), also referred to as gene silencing, is based on using double-stranded RNA (dsRNA) molecules to turn genes off. When introduced into a cell, dsRNAs are processed by the cell into short fragments (generally about 21, 22, or 23 nucleotides in length) known as small interfering RNAs (siRNAs) which the cell uses in a sequence-specific manner to recognize and destroy complementary RNAs. Thompson, Drug Discovery Today 7(17): 912-917 (2002). Accordingly, an aspect of the present invention specifically contemplates isolated nucleic acid molecules that are about 18-26 nucleotides in length, preferably 19-25 nucleotides in length, and more preferably 20, 21, 22, or 23 nucleotides in length, and the use of these nucleic acid molecules for RNAi. Because RNAi molecules, including siRNAs, act in a sequence-specific manner, the SNPs of the present invention can be used to design RNAi reagents that recognize and destroy nucleic acid molecules having specific SNP alleles/nucleotides (such as deleterious alleles that lead to the production of defective proteins), while not affecting nucleic acid molecules having alternative SNP alleles (such as alleles that encode proteins having normal function). As with antisense reagents, RNAi reagents may be directly useful as therapeutic agents (e.g., for turning off defective, disease-causing genes), and are also useful for characterizing and validating gene function (e.g., in gene knock-out or knock-down experiments).

[0323] The following references provide a further review of RNAi: Reynolds et al., “Rational siRNA design for RNA interference,” Nat Biotechnol 22(3):326-30 (March 2004); Epub Feb. 1, 2004; Chi et al., “Genomewide view of gene silencing by small interfering RNAs,” PNAS 100(11):6343-6346 (2003); Vickers et al., “Efficient Reduction of Target RNAs by Small Interfering RNA and RNase H-dependent Antisense Agents,” J Biol Chem 278:7108-7118 (2003); Agami, “RNAi and related mechanisms and their potential use for therapy,” Curr Opin Chem Biol 6(6):829-34 (December 2002); Lavery et al., “Antisense and RNAi: powerful tools in drug target discovery and validation,” Curr Opin Drug Discov Devel 6(4):561-9 (July 2003); Shi, “Mammalian RNAi for the masses,” Trends Genet. 19(1):9-12 (January 2003); Shuey et al., “RNAi: gene-silencing in therapeutic intervention,” Drug Discovery Today 7(20):1040-1046 (October 2002); McManus et al., Nat Rev Genet. 3(10):737-47 (October 2002); Xia et al., Nat Biotechnol 20(10):1006-10 (October 2002); Plasterk et al., Curr Opin Genet Dev 10(5):562-7 (October 2000); Bosher et al., Nat Cell Biol 2(2):E31-6 (February 2000); and Hunter, Curr Biol 17; 9(12):R440-2 (June 1999).

[0324] Other Therapeutic Aspects

[0325] SNPs have many important uses in drug discovery, screening, and development, and thus the SNPs of the present invention are useful for improving many different aspects of the drug development process.

[0326] For example, a high probability exists that, for any gene/protein selected as a potential drug target, variants of that gene/protein will exist in a patient population. Thus, determining the impact of gene/protein variants on the selection and delivery of a therapeutic agent should be an integral aspect of the drug discovery and development process. Jazwinska, A Trends Guide to Genetic Variation and Genomic Medicine S30-S36 (March 2002).

[0327] Knowledge of variants (e.g., SNPs and any corresponding amino acid polymorphisms) of a particular therapeutic target (e.g., a gene, mRNA transcript, or protein) enables parallel screening of the variants in order to identify therapeutic candidates (e.g., small molecule compounds, antibodies, antisense or RNAi nucleic acid compounds, etc.) that demonstrate efficacy across variants. Rothberg, Nat Biotechnol 19(3):209-11 (March 2001). Such therapeutic candidates would be expected to show equal efficacy across a larger segment of the patient population, thereby leading to a larger potential market for the therapeutic candidate.

[0328] Furthermore, identifying variants of a potential therapeutic target enables the most common form of the target to be used for selection of therapeutic candidates, thereby helping to ensure that the experimental activity that is observed for the selected candidates reflects the real activity expected in the largest proportion of a patient population. Jazwinska, A Trends Guide to Genetic Variation and Genomic Medicine S30-S36 (March 2002).

[0329] Additionally, screening therapeutic candidates against all known variants of a target can enable the early identification of potential toxicities and adverse reactions relating to particular variants. For example, variability in drug absorption, distribution, metabolism and excretion (ADME) caused by, for example, SNPs in therapeutic targets or drug metabolizing genes, can be identified, and this information can be utilized during the drug development process to minimize variability in drug disposition and develop therapeutic agents that are safer across a wider range of a patient population. The SNPs of the present invention, including the variant proteins and encoding polymorphic nucleic acid molecules provided in Tables 1 and 2, are useful in conjunction with a variety of toxicology methods established in the art, such as those set forth in Current Protocols in Toxicology, John Wiley & Sons, Inc., N.Y.

[0330] Furthermore, therapeutic agents that target any art-known proteins (or nucleic acid molecules, either RNA or DNA) may cross-react with the variant proteins (or polymorphic nucleic acid molecules) disclosed in Table 1, thereby significantly affecting the pharmacokinetic properties of the drug. Consequently, the protein variants and the SNP-containing nucleic acid molecules disclosed in Tables 1 and 2 are useful in developing, screening, and evaluating therapeutic agents that target corresponding art-known protein forms (or nucleic acid molecules). Additionally, as discussed above, knowledge of all polymorphic forms of a particular drug target enables the design of therapeutic agents that are effective against most or all such polymorphic forms of the drug target.

[0331] A subject suffering from a pathological condition ascribed to a SNP, such as VT, may be treated so as to correct the genetic defect. See Kren et al., Proc Natl Acad Sci USA 96:10349-10354 (1999). Such a subject can be identified by any method that can detect the polymorphism in a biological sample drawn from the subject. Such a genetic defect may be permanently corrected by administering to such a subject a nucleic acid fragment incorporating a repair sequence that supplies the normal/wild-type nucleotide at the position of the SNP. This site-specific repair sequence can encompass an RNA/DNA oligonucleotide that operates to promote endogenous repair of a subject's genomic DNA. The site-specific repair sequence is administered in an appropriate vehicle, such as a complex with polyethylenimine, encapsulated in anionic liposomes, a viral vector such as an adenovirus, or other pharmaceutical composition that promotes intracellular uptake of the administered nucleic acid. A genetic defect leading to an inborn pathology may then be overcome, as the chimeric oligonucleotides induce incorporation of the normal sequence into the subject's genome. Upon incorporation, the normal gene product is expressed, and the replacement is propagated, thereby engendering a permanent repair and therapeutic enhancement of the clinical condition of the subject.

[0332] In cases in which a cSNP results in a variant protein that is ascribed to be the cause of, or a contributing factor to, a pathological condition, a method of treating such a condition can include administering to a subject experiencing the pathology the wild-type/normal cognate of the variant protein. Once administered in an effective dosing regimen, the wild-type cognate provides complementation or remediation of the pathological condition.

[0333] Variant Proteins, Antibodies, Vectors, Host Cells, & Uses Thereof

[0334] Variant Proteins Encoded by SNP-Containing Nucleic Acid Molecules

[0335] The present invention provides SNP-containing nucleic acid molecules, many of which encode proteins having variant amino acid sequences as compared to the art-known (i.e., wild-type) proteins. Amino acid sequences encoded by the polymorphic nucleic acid molecules of the present invention are referred to as SEQ ID NOS:85-168 in Table 1 and provided in the Sequence Listing. These variants will generally be referred to herein as variant proteins/peptides/polypeptides, or polymorphic proteins/peptides/polypeptides of the present invention. The terms “protein,” “peptide,” and “polypeptide” are used herein interchangeably.

[0336] A variant protein of the present invention may be encoded by, for example, a nonsynonymous nucleotide substitution at any one of the cSNP positions disclosed herein. In addition, variant proteins may also include proteins whose expression, structure, and/or function is altered by a SNP disclosed herein, such as a SNP that creates or destroys a stop codon, a SNP that affects splicing, and a SNP in control/regulatory elements, e.g. promoters, enhancers, or transcription factor binding domains.

[0337] As used herein, a protein or peptide is said to be “isolated” or “purified” when it is substantially free of cellular material or chemical precursors or other chemicals. The variant proteins of the present invention can be purified to homogeneity or other lower degrees of purity. The level of purification will be based on the intended use. The key feature is that the preparation allows for the desired function of the variant protein, even if in the presence of considerable amounts of other components.

[0338] As used herein, “substantially free of cellular material” includes preparations of the variant protein having less than about 30% (by dry weight) other proteins (i.e., contaminating protein), less than about 20% other proteins, less than about 10% other proteins, or less than about 5% other proteins. When the variant protein is recombinantly produced, it can also be substantially free of culture medium, i.e., culture medium represents less than about 20% of the volume of the protein preparation.

[0339] The language “substantially free of chemical precursors or other chemicals” includes preparations of the variant protein in which it is separated from chemical precursors or other chemicals that are involved in its synthesis. In one embodiment, the language “substantially free of chemical precursors or other chemicals” includes preparations of the variant protein having less than about 30% (by dry weight) chemical precursors or other chemicals, less than about 20% chemical precursors or other chemicals, less than about 10% chemical precursors or other chemicals, or less than about 5% chemical precursors or other chemicals.

[0340] An isolated variant protein may be purified from cells that naturally express it, purified from cells that have been altered to express it (recombinant host cells), or synthesized using known protein synthesis methods. For example, a nucleic acid molecule containing SNP(s) encoding the variant protein can be cloned into an expression vector, the expression vector introduced into a host cell, and the variant protein expressed in the host cell. The variant protein can then be isolated from the cells by any appropriate purification scheme using standard protein purification techniques. Examples of these techniques are described in detail below. Sambrook and Russell, Molecular Cloning: A Laboratory Manual, Cold Spring Harbor Laboratory Press, N.Y. (2000).

[0341] The present invention provides isolated variant proteins that comprise, consist of or consist essentially of amino acid sequences that contain one or more variant amino acids encoded by one or more codons that contain a SNP of the present invention.

[0342] Accordingly, the present invention provides variant proteins that consist of amino acid sequences that contain one or more amino acid polymorphisms (or truncations or extensions due to creation or destruction of a stop codon, respectively) encoded by the SNPs provided in Table 1 and/or Table 2. A protein consists of an amino acid sequence when the amino acid sequence is the entire amino acid sequence of the protein.

[0343] The present invention further provides variant proteins that consist essentially of amino acid sequences that contain one or more amino acid polymorphisms (or truncations or extensions due to creation or destruction of a stop codon, respectively) encoded by the SNPs provided in Table 1 and/or Table 2. A protein consists essentially of an amino acid sequence when such an amino acid sequence is present with only a few additional amino acid residues in the final protein.

[0344] The present invention further provides variant proteins that comprise amino acid sequences that contain one or more amino acid polymorphisms (or truncations or extensions due to creation or destruction of a stop codon, respectively) encoded by the SNPs provided in Table 1 and/or Table 2. A protein comprises an amino acid sequence when the amino acid sequence is at least part of the final amino acid sequence of the protein. In such a fashion, the protein may contain only the variant amino acid sequence or have additional amino acid residues, such as a contiguous encoded sequence that is naturally associated with it or heterologous amino acid residues. Such a protein can have a few additional amino acid residues or can comprise many more additional amino acids. A brief description of how various types of these proteins can be made and isolated is provided below.

[0345] The variant proteins of the present invention can be attached to heterologous sequences to form chimeric or fusion proteins. Such chimeric and fusion proteins comprise a variant protein operatively linked to a heterologous protein having an amino acid sequence not substantially homologous to the variant protein. “Operatively linked” indicates that the coding sequences for the variant protein and the heterologous protein are ligated in-frame. The heterologous protein can be fused to the N-terminus or C-terminus of the variant protein. In another embodiment, the fusion protein is encoded by a fusion polynucleotide that is synthesized by conventional techniques including automated DNA synthesizers. Alternatively, PCR amplification of gene fragments can be carried out using anchor primers which give rise to complementary overhangs between two consecutive gene fragments which can subsequently be annealed and re-amplified to generate a chimeric gene sequence. See Ausubel et al., Current Protocols in Molecular Biology (1992). Moreover, many expression vectors are commercially available that already encode a fusion moiety (e.g., a GST protein). A variant protein-encoding nucleic acid can be cloned into such an expression vector such that the fusion moiety is linked in-frame to the variant protein.

[0346] In many uses, the fusion protein does not affect the activity of the variant protein. The fusion protein can include, but is not limited to, enzymatic fusion proteins, for example, beta-galactosidase fusions, yeast two-hybrid GAL fusions, poly-His fusions, MYC-tagged, HI-tagged and Ig fusions. Such fusion proteins, particularly poly-His fusions, can facilitate their purification following recombinant expression. In certain host cells (e.g., mammalian host cells), expression and/or secretion of a protein can be increased by using a heterologous signal sequence. Fusion proteins are further described in, for example, Terpe, “Overview of tag protein fusions: from molecular and biochemical fundamentals to commercial systems,” Appl Microbiol Biotechnol 60(5):523-33 (January 2003); Epub Nov. 7, 2002; Graddis et al., “Designing proteins that work using recombinant technologies,” Curr Pharm Biotechnol 3(4):285-97 (December 2002); and Nilsson et al., “Affinity fusion strategies for detection, purification, and immobilization of recombinant proteins,” Protein Expr Purif 11(1):1-16 (October 1997).

[0347] In certain embodiments, novel compositions of the present invention also relate to further obvious variants of the variant polypeptides of the present invention, such as naturally-occurring mature forms (e.g., allelic variants), non-naturally occurring recombinantly-derived variants, and orthologs and paralogs of such proteins that share sequence homology. Such variants can readily be generated using art-known techniques in the fields of recombinant nucleic acid technology and protein biochemistry.

[0348] Further variants of the variant polypeptides disclosed in Table 1 can comprise an amino acid sequence that shares at least 70-80%, 80-85%, 85-90%, 91%, 92%, 93%, 94%, 95%, 96%, 97%, 98%, or 99% sequence identity with an amino acid sequence disclosed in Table 1 (or a fragment thereof) and that includes a novel amino acid residue (allele) disclosed in Table 1 (which is encoded by a novel SNP allele). Thus, an aspect of the present invention that is specifically contemplated are polypeptides that have a certain degree of sequence variation compared with the polypeptide sequences shown in Table 1, but that contain a novel amino acid residue (allele) encoded by a novel SNP allele disclosed herein. In other words, as long as a polypeptide contains a novel amino acid residue disclosed herein, other portions of the polypeptide that flank the novel amino acid residue can vary to some degree from the polypeptide sequences shown in Table 1.

[0349] Full-length pre-processed forms, as well as mature processed forms, of proteins that comprise one of the amino acid sequences disclosed herein can readily be identified as having complete sequence identity to one of the variant proteins of the present invention as well as being encoded by the same genetic locus as the variant proteins provided herein.

[0350] Orthologs of a variant peptide can readily be identified as having some degree of significant sequence homology/identity to at least a portion of a variant peptide as well as being encoded by a gene from another organism. Preferred orthologs will be isolated from non-human mammals, preferably primates, for the development of human therapeutic targets and agents. Such orthologs can be encoded by a nucleic acid sequence that hybridizes to a variant peptide-encoding nucleic acid molecule under moderate to stringent conditions depending on the degree of relatedness of the two organisms yielding the homologous proteins.

[0351] Variant proteins include, but are not limited to, proteins containing deletions, additions and substitutions in the amino acid sequence caused by the SNPs of the present invention. One class of substitutions is conserved amino acid substitutions in which a given amino acid in a polypeptide is substituted for another amino acid of like characteristics. Typical conservative substitutions are replacements, one for another, among the aliphatic amino acids Ala, Val, Leu, and Ile; interchange of the hydroxyl residues Ser and Thr; exchange of the acidic residues Asp and Glu; substitution between the amide residues Asn and Gln; exchange of the basic residues Lys and Arg; and replacements among the aromatic residues Phe and Tyr. Guidance concerning which amino acid changes are likely to be phenotypically silent are found, for example, in Bowie et al., Science 247:1306-1310 (1990).

[0352] Variant proteins can be fully functional or can lack function in one or more activities, e.g. ability to bind another molecule, ability to catalyze a substrate, ability to mediate signaling, etc. Fully functional variants typically contain only conservative variations or variations in non-critical residues or in non-critical regions. Functional variants can also contain substitution of similar amino acids that result in no change or an insignificant change in function. Alternatively, such substitutions may positively or negatively affect function to some degree. Non-functional variants typically contain one or more non-conservative amino acid substitutions, deletions, insertions, inversions, truncations or extensions, or a substitution, insertion, inversion, or deletion of a critical residue or in a critical region.

[0353] Amino acids that are essential for function of a protein can be identified by methods known in the art, such as site-directed mutagenesis or alanine-scanning mutagenesis, particularly using the amino acid sequence and polymorphism information provided in Table 1. Cunningham et al., Science 244:1081-1085 (1989). The latter procedure introduces single alanine mutations at every residue in the molecule. The resulting mutant molecules are then tested for biological activity such as enzyme activity or in assays such as an in vitro proliferative activity. Sites that are critical for binding partner/substrate binding can also be determined by structural analysis such as crystallization, nuclear magnetic resonance or photoaffinity labeling. Smith et al., J Mol Biol 224:899-904 (1992); de Vos et al., Science 255:306-312 (1992).

[0354] Polypeptides can contain amino acids other than the 20 amino acids commonly referred to as the 20 naturally occurring amino acids. Further, many amino acids, including the terminal amino acids, may be modified by natural processes, such as processing and other post-translational modifications, or by chemical modification techniques well known in the art. Accordingly, the variant proteins of the present invention also encompass derivatives or analogs in which a substituted amino acid residue is not one encoded by the genetic code, in which a substituent group is included, in which the mature polypeptide is fused with another compound, such as a compound to increase the half-life of the polypeptide (e.g., polyethylene glycol), or in which additional amino acids are fused to the mature polypeptide, such as a leader or secretory sequence or a sequence for purification of the mature polypeptide or a pro-protein sequence.

[0355] Known protein modifications include, but are not limited to, acetylation, acylation, ADP-ribosylation, amidation, covalent attachment of flavin, covalent attachment of a heme moiety, covalent attachment of a nucleotide or nucleotide derivative, covalent attachment of a lipid or lipid derivative, covalent attachment of phosphotidylinositol, cross-linking, cyclization, disulfide bond formation, demethylation, formation of covalent crosslinks, formation of cystine, formation of pyroglutamate, formylation, gamma carboxylation, glycosylation, GPI anchor formation, hydroxylation, iodination, methylation, myristoylation, oxidation, proteolytic processing, phosphorylation, prenylation, racemization, selenoylation, sulfation, transfer-RNA mediated addition of amino acids to proteins such as arginylation, and ubiquitination.

[0356] Such protein modifications are well known to those of skill in the art and have been described in great detail in the scientific literature. Particularly common modifications, for example glycosylation, lipid attachment, sulfation, gamma-carboxylation of glutamic acid residues, hydroxylation and ADP-ribosylation, are described in most basic texts, such as Proteins—Structure and Molecular Properties 2nd Ed., T. E. Creighton, W.H. Freeman and Company, N.Y. (1993); F. Wold, Posttranslational Covalent Modification of Proteins 1-12, B. C. Johnson, ed., Academic Press, N.Y. (1983); Seifter et al., Meth Enzymol 182:626-646 (1990); and Rattan et al., Ann NY Acad Sci 663:48-62 (1992).

[0357] The present invention further provides fragments of the variant proteins in which the fragments contain one or more amino acid sequence variations (e.g., substitutions, or truncations or extensions due to creation or destruction of a stop codon) encoded by one or more SNPs disclosed herein. The fragments to which the invention pertains, however, are not to be construed as encompassing fragments that have been disclosed in the prior art before the present invention.

[0358] As used herein, a fragment may comprise at least about 4, 8, 10, 12, 14, 16, 18, 20, 25, 30, 50, 100 (or any other number in-between) or more contiguous amino acid residues from a variant protein, wherein at least one amino acid residue is affected by a SNP of the present invention, e.g., a variant amino acid residue encoded by a nonsynonymous nucleotide substitution at a cSNP position provided by the present invention. The variant amino acid encoded by a cSNP may occupy any residue position along the sequence of the fragment. Such fragments can be chosen based on the ability to retain one or more of the biological activities of the variant protein or the ability to perform a function, e.g., act as an immunogen. Particularly important fragments are biologically active fragments. Such fragments will typically comprise a domain or motif of a variant protein of the present invention, e.g., active site, transmembrane domain, or ligand/substrate binding domain. Other fragments include, but are not limited to, domain or motif-containing fragments, soluble peptide fragments, and fragments containing immunogenic structures. Predicted domains and functional sites are readily identifiable by computer programs well known to those of skill in the art (e.g., PROSITE analysis). Current Protocols in Protein Science, John Wiley & Sons, N.Y. (2002).

[0359] Uses of Variant Proteins

[0360] The variant proteins of the present invention can be used in a variety of ways, including but not limited to, in assays to determine the biological activity of a variant protein, such as in a panel of multiple proteins for high-throughput screening; to raise antibodies or to elicit another type of immune response; as a reagent (including the labeled reagent) in assays designed to quantitatively determine levels of the variant protein (or its binding partner) in biological fluids; as a marker for cells or tissues in which it is preferentially expressed (either constitutively or at a particular stage of tissue differentiation or development or in a disease state); as a target for screening for a therapeutic agent; and as a direct therapeutic agent to be administered into a human subject. Any of the variant proteins disclosed herein may be developed into reagent grade or kit format for commercialization as research products. Methods for performing the uses listed above are well known to those skilled in the art. See, e.g., Molecular Cloning: A Laboratory Manual, Sambrook and Russell, Cold Spring Harbor Laboratory Press, N.Y. (2000), and Methods in Enzymology: Guide to Molecular Cloning Techniques, S. L. Berger and A. R. Kimmel, eds., Academic Press (1987).

[0361] In a specific embodiment of the invention, the methods of the present invention include detection of one or more variant proteins disclosed herein. Variant proteins are disclosed in Table 1 and in the Sequence Listing as SEQ ID NOS:85-168. Detection of such proteins can be accomplished using, for example, antibodies, small molecule compounds, aptamers, ligands/substrates, other proteins or protein fragments, or other protein-binding agents. Preferably, protein detection agents are specific for a variant protein of the present invention and can therefore discriminate between a variant protein of the present invention and the wild-type protein or another variant form. This can generally be accomplished by, for example, selecting or designing detection agents that bind to the region of a protein that differs between the variant and wild-type protein, such as a region of a protein that contains one or more amino acid substitutions that is/are encoded by a non-synonymous cSNP of the present invention, or a region of a protein that follows a nonsense mutation-type SNP that creates a stop codon thereby leading to a shorter polypeptide, or a region of a protein that follows a read-through mutation-type SNP that destroys a stop codon thereby leading to a longer polypeptide in which a portion of the polypeptide is present in one version of the polypeptide but not the other.

[0362] In another aspect of the invention, variant proteins of the present invention can be used as targets for predicting an individual's response to statin treatment (particularly for reducing the risk of VT), for determining predisposition to VT, for diagnosing VT, or for treating and/or preventing VT, etc. Accordingly, the invention provides methods for detecting the presence of, or levels of, one or more variant proteins of the present invention in a cell, tissue, or organism. Such methods typically involve contacting a test sample with an agent (e.g., an antibody, small molecule compound, or peptide) capable of interacting with the variant protein such that specific binding of the agent to the variant protein can be detected. Such an assay can be provided in a single detection format or a multi-detection format such as an array, for example, an antibody or aptamer array (arrays for protein detection may also be referred to as “protein chips”). The variant protein of interest can be isolated from a test sample and assayed for the presence of a variant amino acid sequence encoded by one or more SNPs disclosed by the present invention. The SNPs may cause changes to the protein and the corresponding protein function/activity, such as through non-synonymous substitutions in protein coding regions that can lead to amino acid substitutions, deletions, insertions, and/or rearrangements; formation or destruction of stop codons; or alteration of control elements such as promoters. SNPs may also cause inappropriate post-translational modifications.

[0363] One preferred agent for detecting a variant protein in a sample is an antibody capable of selectively binding to a variant form of the protein (antibodies are described in greater detail in the next section). Such samples include, for example, tissues, cells, and biological fluids isolated from a subject, as well as tissues, cells and fluids present within a subject.

[0364] In vitro methods for detection of the variant proteins associated with statin response that are disclosed herein and fragments thereof include, but are not limited to, enzyme linked immunosorbent assays (ELISAs), radioimmunoassays (RIA), Western blots, immunoprecipitations, immunofluorescence, and protein arrays/chips (e.g., arrays of antibodies or aptamers). For further information regarding immunoassays and related protein detection methods, see Current Protocols in Immunology, John Wiley & Sons, N.Y., and Hage, “Immunoassays,” Anal Chem 15; 71(12):294R-304R (June 1999).

[0365] Additional analytic methods of detecting amino acid variants include, but are not limited to, altered electrophoretic mobility, altered tryptic peptide digest, altered protein activity in cell-based or cell-free assay, alteration in ligand or antibody-binding pattern, altered isoelectric point, and direct amino acid sequencing.

[0366] Alternatively, variant proteins can be detected in vivo in a subject by introducing into the subject a labeled antibody (or other type of detection reagent) specific for a variant protein. For example, the antibody can be labeled with a radioactive marker whose presence and location in a subject can be detected by standard imaging techniques.

[0367] Other uses of the variant peptides of the present invention are based on the class or action of the protein. For example, proteins isolated from humans and their mammalian orthologs serve as targets for identifying agents (e.g., small molecule drugs or antibodies) for use in therapeutic applications, particularly for modulating a biological or pathological response in a cell or tissue that expresses the protein. Pharmaceutical agents can be developed that modulate protein activity.

[0368] As an alternative to modulating gene expression, therapeutic compounds can be developed that modulate protein function. For example, many SNPs disclosed herein affect the amino acid sequence of the encoded protein (e.g., non-synonymous cSNPs and nonsense mutation-type SNPs). Such alterations in the encoded amino acid sequence may affect protein function, particularly if such amino acid sequence variations occur in functional protein domains, such as catalytic domains, ATP-binding domains, or ligand/substrate binding domains. It is well established in the art that variant proteins having amino acid sequence variations in functional domains can cause or influence pathological conditions. In such instances, compounds (e.g., small molecule drugs or antibodies) can be developed that target the variant protein and modulate (e.g., up- or down-regulate) protein function/activity.

[0369] The therapeutic methods of the present invention further include methods that target one or more variant proteins of the present invention. Variant proteins can be targeted using, for example, small molecule compounds, antibodies, aptamers, ligands/substrates, other proteins, or other protein-binding agents. Additionally, the skilled artisan will recognize that the novel protein variants (and polymorphic nucleic acid molecules) disclosed in Table 1 may themselves be directly used as therapeutic agents by acting as competitive inhibitors of corresponding art-known proteins (or nucleic acid molecules such as mRNA molecules).

[0370] The variant proteins of the present invention are particularly useful in drug screening assays, in cell-based or cell-free systems. Cell-based systems can utilize cells that naturally express the protein, a biopsy specimen, or cell cultures. In one embodiment, cell-based assays involve recombinant host cells expressing the variant protein. Cell-free assays can be used to detect the ability of a compound to directly bind to a variant protein or to the corresponding SNP-containing nucleic acid fragment that encodes the variant protein.

[0371] A variant protein of the present invention, as well as appropriate fragments thereof, can be used in high-throughput screening assays to test candidate compounds for the ability to bind and/or modulate the activity of the variant protein. These candidate compounds can be further screened against a protein having normal function (e.g., a wild-type/non-variant protein) to further determine the effect of the compound on the protein activity. Furthermore, these compounds can be tested in animal or invertebrate systems to determine in vivo activity/effectiveness. Compounds can be identified that activate (agonists) or inactivate (antagonists) the variant protein, and different compounds can be identified that cause various degrees of activation or inactivation of the variant protein.

[0372] Further, the variant proteins can be used to screen a compound for the ability to stimulate or inhibit interaction between the variant protein and a target molecule that normally interacts with the protein. The target can be a ligand, a substrate or a binding partner that the protein normally interacts with (for example, epinephrine or norepinephrine). Such assays typically include the steps of combining the variant protein with a candidate compound under conditions that allow the variant protein, or fragment thereof, to interact with the target molecule, and to detect the formation of a complex between the protein and the target or to detect the biochemical consequence of the interaction with the variant protein and the target, such as any of the associated effects of signal transduction.

[0373] Candidate compounds include, for example, 1) peptides such as soluble peptides, including Ig-tailed fusion peptides and members of random peptide libraries (see, e.g., Lam et al., Nature 354:82-84 (1991); Houghten et al., Nature 354:84-86 (1991)) and combinatorial chemistry-derived molecular libraries made of D- and/or L- configuration amino acids; 2) phosphopeptides (e.g., members of random and partially degenerate, directed phosphopeptide libraries, see, e.g., Songyang et al., Cell 72:767-778 (1993)); 3) antibodies (e.g., polyclonal, monoclonal, humanized, anti-idiotypic, chimeric, and single chain antibodies as well as Fab, F(ab′)₂, Fab expression library fragments, and epitope-binding fragments of antibodies); and 4) small organic and inorganic molecules (e.g., molecules obtained from combinatorial and natural product libraries).

[0374] One candidate compound is a soluble fragment of the variant protein that competes for ligand binding. Other candidate compounds include mutant proteins or appropriate fragments containing mutations that affect variant protein function and thus compete for ligand. Accordingly, a fragment that competes for ligand, for example with a higher affinity, or a fragment that binds ligand but does not allow release, is encompassed by the invention.

[0375] The invention further includes other end point assays to identify compounds that modulate (stimulate or inhibit) variant protein activity. The assays typically involve an assay of events in the signal transduction pathway that indicate protein activity. Thus, the expression of genes that are up or down-regulated in response to the variant protein dependent signal cascade can be assayed. In one embodiment, the regulatory region of such genes can be operably linked to a marker that is easily detectable, such as luciferase. Alternatively, phosphorylation of the variant protein, or a variant protein target, could also be measured. Any of the biological or biochemical functions mediated by the variant protein can be used as an endpoint assay. These include all of the biochemical or biological events described herein, in the references cited herein, incorporated by reference for these endpoint assay targets, and other functions known to those of ordinary skill in the art.

[0376] Binding and/or activating compounds can also be screened by using chimeric variant proteins in which an amino terminal extracellular domain or parts thereof, an entire transmembrane domain or subregions, and/or the carboxyl terminal intracellular domain or parts thereof, can be replaced by heterologous domains or subregions. For example, a substrate-binding region can be used that interacts with a different substrate than that which is normally recognized by a variant protein. Accordingly, a different set of signal transduction components is available as an end-point assay for activation. This allows for assays to be performed in other than the specific host cell from which the variant protein is derived.

[0377] The variant proteins are also useful in competition binding assays in methods designed to discover compounds that interact with the variant protein. Thus, a compound can be exposed to a variant protein under conditions that allow the compound to bind or to otherwise interact with the variant protein. A binding partner, such as ligand, that normally interacts with the variant protein is also added to the mixture. If the test compound interacts with the variant protein or its binding partner, it decreases the amount of complex formed or activity from the variant protein. This type of assay is particularly useful in screening for compounds that interact with specific regions of the variant protein. Hodgson, Bio/technology, 10(9), 973-80 (September 1992).

[0378] To perform cell-free drug screening assays, it is sometimes desirable to immobilize either the variant protein or a fragment thereof, or its target molecule, to facilitate separation of complexes from uncomplexed forms of one or both of the proteins, as well as to accommodate automation of the assay. Any method for immobilizing proteins on matrices can be used in drug screening assays. In one embodiment, a fusion protein containing an added domain allows the protein to be bound to a matrix. For example, glutathione-S-transferase/¹²⁵I fusion proteins can be adsorbed onto glutathione sepharose beads (Sigma Chemical, St. Louis, Mo.) or glutathione derivatized microtitre plates, which are then combined with the cell lysates (e.g., ³⁵S-labeled) and a candidate compound, such as a drug candidate, and the mixture incubated under conditions conducive to complex formation (e.g., at physiological conditions for salt and pH). Following incubation, the beads can be washed to remove any unbound label, and the matrix immobilized and radiolabel determined directly, or in the supernatant after the complexes are dissociated. Alternatively, the complexes can be dissociated from the matrix, separated by SDS-PAGE, and the level of bound material found in the bead fraction quantitated from the gel using standard electrophoretic techniques.

[0379] Either the variant protein or its target molecule can be immobilized utilizing conjugation of biotin and streptavidin. Alternatively, antibodies reactive with the variant protein but which do not interfere with binding of the variant protein to its target molecule can be derivatized to the wells of the plate, and the variant protein trapped in the wells by antibody conjugation. Preparations of the target molecule and a candidate compound are incubated in the variant protein-presenting wells and the amount of complex trapped in the well can be quantitated. Methods for detecting such complexes, in addition to those described above for the GST-immobilized complexes, include immunodetection of complexes using antibodies reactive with the protein target molecule, or which are reactive with variant protein and compete with the target molecule, and enzyme-linked assays that rely on detecting an enzymatic activity associated with the target molecule.

[0380] Modulators of variant protein activity identified according to these drug screening assays can be used to treat a subject with a disorder mediated by the protein pathway, such as VT. These methods of treatment typically include the steps of administering the modulators of protein activity in a pharmaceutical composition to a subject in need of such treatment.

[0381] The variant proteins, or fragments thereof, disclosed herein can themselves be directly used to treat a disorder characterized by an absence of, inappropriate, or unwanted expression or activity of the variant protein. Accordingly, methods for treatment include the use of a variant protein disclosed herein or fragments thereof.

[0382] In yet another aspect of the invention, variant proteins can be used as “bait proteins” in a two-hybrid assay or three-hybrid assay to identify other proteins that bind to or interact with the variant protein and are involved in variant protein activity. See, e.g., U.S. Pat. No. 5,283,317; Zervos et al., Cell 72:223-232 (1993); Madura et al., J Biol Chem 268:12046-12054 (1993); Bartel et al., Biotechniques 14:920-924 (1993); Iwabuchi et al., Oncogene 8:1693-1696 (1993); and Brent, WO 94/10300. Such variant protein-binding proteins are also likely to be involved in the propagation of signals by the variant proteins or variant protein targets as, for example, elements of a protein-mediated signaling pathway. Alternatively, such variant protein-binding proteins are inhibitors of the variant protein.

[0383] The two-hybrid system is based on the modular nature of most transcription factors, which typically consist of separable DNA-binding and activation domains. Briefly, the assay typically utilizes two different DNA constructs. In one construct, the gene that codes for a variant protein is fused to a gene encoding the DNA binding domain of a known transcription factor (e.g., GAL-4). In the other construct, a DNA sequence, from a library of DNA sequences, that encodes an unidentified protein (“prey” or “sample”) is fused to a gene that codes for the activation domain of the known transcription factor. If the “bait” and the “prey” proteins are able to interact, in vivo, forming a variant protein-dependent complex, the DNA-binding and activation domains of the transcription factor are brought into close proximity. This proximity allows transcription of a reporter gene (e.g., LacZ) that is operably linked to a transcriptional regulatory site responsive to the transcription factor. Expression of the reporter gene can be detected, and cell colonies containing the functional transcription factor can be isolated and used to obtain the cloned gene that encodes the protein that interacts with the variant protein.

[0384] Antibodies Directed to Variant Proteins

[0385] The present invention also provides antibodies that selectively bind to the variant proteins disclosed herein and fragments thereof. Such antibodies may be used to quantitatively or qualitatively detect the variant proteins of the present invention. As used herein, an antibody selectively binds a target variant protein when it binds the variant protein and does not significantly bind to non-variant proteins, i.e., the antibody does not significantly bind to normal, wild-type, or art-known proteins that do not contain a variant amino acid sequence due to one or more SNPs of the present invention (variant amino acid sequences may be due to, for example, nonsynonymous cSNPs, nonsense SNPs that create a stop codon, thereby causing a truncation of a polypeptide or SNPs that cause read-through mutations resulting in an extension of a polypeptide).

[0386] As used herein, an antibody is defined in terms consistent with that recognized in the art: they are multi-subunit proteins produced by an organism in response to an antigen challenge. The antibodies of the present invention include both monoclonal antibodies and polyclonal antibodies, as well as antigen-reactive proteolytic fragments of such antibodies, such as Fab, F(ab)′₂, and Fv fragments. In addition, an antibody of the present invention further includes any of a variety of engineered antigen-binding molecules such as a chimeric antibody (U.S. Pat. Nos. 4,816,567 and 4,816,397; Morrison et al., Proc Natl Acad Sci USA 81:6851 (1984); Neuberger et al., Nature 312:604 (1984)), a humanized antibody (U.S. Pat. Nos. 5,693,762; 5,585,089 and 5,565,332), a single-chain Fv (U.S. Pat. No. 4,946,778; Ward et al., Nature 334:544 (1989)), a bispecific antibody with two binding specificities (Segal et al., J Immunol Methods 248:1 (2001); Carter, J Immunol Methods 248:7 (2001)), a diabody, a triabody, and a tetrabody (Todorovska et al., J Immunol Methods 248:47 (2001)), as well as a Fab conjugate (dimer or trimer), and a minibody.

[0387] Many methods are known in the art for generating and/or identifying antibodies to a given target antigen. Harlow, Antibodies, Cold Spring Harbor Press, N.Y. (1989). In general, an isolated peptide (e.g., a variant protein of the present invention) is used as an immunogen and is administered to a mammalian organism, such as a rat, rabbit, hamster or mouse. Either a full-length protein, an antigenic peptide fragment (e.g., a peptide fragment containing a region that varies between a variant protein and a corresponding wild-type protein), or a fusion protein can be used. A protein used as an immunogen may be naturally-occurring, synthetic or recombinantly produced, and may be administered in combination with an adjuvant, including but not limited to, Freund's (complete and incomplete), mineral gels such as aluminum hydroxide, surface active substance such as lysolecithin, pluronic polyols, polyanions, peptides, oil emulsions, keyhole limpet hemocyanin, dinitrophenol, and the like.

[0388] Monoclonal antibodies can be produced by hybridoma technology, which immortalizes cells secreting a specific monoclonal antibody. Kohler and Milstein, Nature 256:495 (1975). The immortalized cell lines can be created in vitro by fusing two different cell types, typically lymphocytes, and tumor cells. The hybridoma cells may be cultivated in vitro or in vivo. Additionally, fully human antibodies can be generated by transgenic animals. He et al., J Immunol 169:595 (2002). Fd phage and Fd phagemid technologies may be used to generate and select recombinant antibodies in vitro. Hoogenboom and Chames, Immunol Today 21:371 (2000); Liu et al., J Mol Biol 315:1063 (2002). The complementarity-determining regions of an antibody can be identified, and synthetic peptides corresponding to such regions may be used to mediate antigen binding. U.S. Pat. No. 5,637,677.

[0389] Antibodies are preferably prepared against regions or discrete fragments of a variant protein containing a variant amino acid sequence as compared to the corresponding wild-type protein (e.g., a region of a variant protein that includes an amino acid encoded by a nonsynonymous cSNP, a region affected by truncation caused by a nonsense SNP that creates a stop codon, or a region resulting from the destruction of a stop codon due to read-through mutation caused by a SNP). Furthermore, preferred regions will include those involved in function/activity and/or protein/binding partner interaction. Such fragments can be selected on a physical property, such as fragments corresponding to regions that are located on the surface of the protein, e.g., hydrophilic regions, or can be selected based on sequence uniqueness, or based on the position of the variant amino acid residue(s) encoded by the SNPs provided by the present invention. An antigenic fragment will typically comprise at least about 8-10 contiguous amino acid residues in which at least one of the amino acid residues is an amino acid affected by a SNP disclosed herein. The antigenic peptide can comprise, however, at least 12, 14, 16, 20, 25, 50, 100 (or any other number in-between) or more amino acid residues, provided that at least one amino acid is affected by a SNP disclosed herein.

[0390] Detection of an antibody of the present invention can be facilitated by coupling (i.e., physically linking) the antibody or an antigen-reactive fragment thereof to a detectable substance. Detectable substances include, but are not limited to, various enzymes, prosthetic groups, fluorescent materials, luminescent materials, bioluminescent materials, and radioactive materials. Examples of suitable enzymes include horseradish peroxidase, alkaline phosphatase, β-galactosidase, or acetylcholinesterase; examples of suitable prosthetic group complexes include streptavidin/biotin and avidin/biotin; examples of suitable fluorescent materials include umbelliferone, fluorescein, fluorescein isothiocyanate, rhodamine, dichlorotriazinylamine fluorescein, dansyl chloride or phycoerythrin; an example of a luminescent material includes luminol; examples of bioluminescent materials include luciferase, luciferin, and aequorin, and examples of suitable radioactive material include ¹²⁵I, ¹³¹I, ³⁵S or³H.

[0391] Antibodies, particularly the use of antibodies as therapeutic agents, are reviewed in: Morgan, “Antibody therapy for Alzheimer's disease,” Expert Rev Vaccines (1):53-9 (February 2003); Ross et al., “Anticancer antibodies,” Am J Clin Pathol 119(4):472-85 (April 2003); Goldenberg, “Advancing role of radiolabeled antibodies in the therapy of cancer,” Cancer Immunol Immunother 52(5):281-96 (May 2003); Epub Mar. 11, 2003; Ross et al., “Antibody-based therapeutics in oncology,” Expert Rev Anticancer Ther 3(1):107-21 (February 2003); Cao et al., “Bispecific antibody conjugates in therapeutics,” Adv Drug Deliv Rev 55(2):171-97 (February 2003); von Mehren et al., “Monoclonal antibody therapy for cancer,” Annu Rev Med 54:343-69 (2003); Epub Dec. 3, 2001; Hudson et al., “Engineered antibodies,” Nat Med 9(1):129-34 (January 2003); Brekke et al., “Therapeutic antibodies for human diseases at the dawn of the twenty-first century,” Nat Rev Drug Discov 2(1):52-62 (January 2003); Erratum in: Nat Rev Drug Discov 2(3):240 (March 2003); Houdebine, “Antibody manufacture in transgenic animals and comparisons with other systems,” Curr Opin Biotechnol 13(6):625-9 (December 2002); Andreakos et al., “Monoclonal antibodies in immune and inflammatory diseases,” Curr Opin Biotechnol 13(6):615-20 (December 2002); Kellermann et al., “Antibody discovery: the use of transgenic mice to generate human monoclonal antibodies for therapeutics,” Curr Opin Biotechnol 13(6):593-7 (December 2002); Pini et al., “Phage display and colony filter screening for high-throughput selection of antibody libraries,” Comb Chem High Throughput Screen 5(7):503-10 (November 2002); Batra et al., “Pharmacokinetics and biodistribution of genetically engineered antibodies,” Curr Opin Biotechnol 13(6):603-8 (December 2002); and Tangri et al., “Rationally engineered proteins or antibodies with absent or reduced immunogenicity,” Curr Med Chem 9(24):2191-9 (December 2002).

[0392] Uses of Antibodies

[0393] Antibodies can be used to isolate the variant proteins of the present invention from a natural cell source or from recombinant host cells by standard techniques, such as affinity chromatography or immunoprecipitation. In addition, antibodies are useful for detecting the presence of a variant protein of the present invention in cells or tissues to determine the pattern of expression of the variant protein among various tissues in an organism and over the course of normal development or disease progression. Further, antibodies can be used to detect variant protein in situ, in vitro, in a bodily fluid, or in a cell lysate or supernatant in order to evaluate the amount and pattern of expression. Also, antibodies can be used to assess abnormal tissue distribution, abnormal expression during development, or expression in an abnormal condition, such as in VT, or during statin treatment. Additionally, antibody detection of circulating fragments of the full-length variant protein can be used to identify turnover.

[0394] Antibodies to the variant proteins of the present invention are also useful in pharmacogenomic analysis. Thus, antibodies against variant proteins encoded by alternative SNP alleles can be used to identify individuals that require modified treatment modalities.

[0395] Further, antibodies can be used to assess expression of the variant protein in disease states such as in active stages of the disease or in an individual with a predisposition to a disease related to the protein's function, such as VT, or during the course of a treatment regime, such as during statin treatment. Antibodies specific for a variant protein encoded by a SNP-containing nucleic acid molecule of the present invention can be used to assay for the presence of the variant protein, such as to determine an individual's response to statin treatment (particularly for reducing their risk for VT) or to diagnose VT or predisposition/susceptibility to VT, as indicated by the presence of the variant protein.

[0396] Antibodies are also useful as diagnostic tools for evaluating the variant proteins in conjunction with analysis by electrophoretic mobility, isoelectric point, tryptic peptide digest, and other physical assays well known in the art.

[0397] Antibodies are also useful for tissue typing. Thus, where a specific variant protein has been correlated with expression in a specific tissue, antibodies that are specific for this protein can be used to identify a tissue type.

[0398] Antibodies can also be used to assess aberrant subcellular localization of a variant protein in cells in various tissues. The diagnostic uses can be applied, not only in genetic testing, but also in monitoring a treatment modality. Accordingly, where treatment is ultimately aimed at correcting the expression level or the presence of variant protein or aberrant tissue distribution or developmental expression of a variant protein, antibodies directed against the variant protein or relevant fragments can be used to monitor therapeutic efficacy.

[0399] The antibodies are also useful for inhibiting variant protein function, for example, by blocking the binding of a variant protein to a binding partner. These uses can also be applied in a therapeutic context in which treatment involves inhibiting a variant protein's function. An antibody can be used, for example, to block or competitively inhibit binding, thus modulating (agonizing or antagonizing) the activity of a variant protein. Antibodies can be prepared against specific variant protein fragments containing sites required for function or against an intact variant protein that is associated with a cell or cell membrane. For in vivo administration, an antibody may be linked with an additional therapeutic payload such as a radionuclide, an enzyme, an immunogenic epitope, or a cytotoxic agent. Suitable cytotoxic agents include, but are not limited to, bacterial toxin such as diphtheria, and plant toxin such as ricin. The in vivo half-life of an antibody or a fragment thereof may be lengthened by pegylation through conjugation to polyethylene glycol. Leong et al., Cytokine 16:106 (2001).

[0400] The invention also encompasses kits for using antibodies, such as kits for detecting the presence of a variant protein in a test sample. An exemplary kit can comprise antibodies such as a labeled or labelable antibody and a compound or agent for detecting variant proteins in a biological sample; means for determining the amount, or presence/absence of variant protein in the sample; means for comparing the amount of variant protein in the sample with a standard; and instructions for use.

[0401] Vectors and Host Cells

[0402] The present invention also provides vectors containing the SNP-containing nucleic acid molecules described herein. The term “vector” refers to a vehicle, preferably a nucleic acid molecule, which can transport a SNP-containing nucleic acid molecule. When the vector is a nucleic acid molecule, the SNP-containing nucleic acid molecule can be covalently linked to the vector nucleic acid. Such vectors include, but are not limited to, a plasmid, single or double stranded phage, a single or double stranded RNA or DNA viral vector, or artificial chromosome, such as a BAC, PAC, YAC, or MAC.

[0403] A vector can be maintained in a host cell as an extrachromosomal element where it replicates and produces additional copies of the SNP-containing nucleic acid molecules. Alternatively, the vector may integrate into the host cell genome and produce additional copies of the SNP-containing nucleic acid molecules when the host cell replicates.

[0404] The invention provides vectors for the maintenance (cloning vectors) or vectors for expression (expression vectors) of the SNP-containing nucleic acid molecules. The vectors can function in prokaryotic or eukaryotic cells or in both (shuttle vectors).

[0405] Expression vectors typically contain cis-acting regulatory regions that are operably linked in the vector to the SNP-containing nucleic acid molecules such that transcription of the SNP-containing nucleic acid molecules is allowed in a host cell. The SNP-containing nucleic acid molecules can also be introduced into the host cell with a separate nucleic acid molecule capable of affecting transcription. Thus, the second nucleic acid molecule may provide a trans-acting factor interacting with the cis-regulatory control region to allow transcription of the SNP-containing nucleic acid molecules from the vector. Alternatively, a trans-acting factor may be supplied by the host cell. Finally, a trans-acting factor can be produced from the vector itself. It is understood, however, that in some embodiments, transcription and/or translation of the nucleic acid molecules can occur in a cell-free system.

[0406] The regulatory sequences to which the SNP-containing nucleic acid molecules described herein can be operably linked include promoters for directing mRNA transcription. These include, but are not limited to, the left promoter from bacteriophage λ, the lac, TRP, and TAC promoters from E. coli, the early and late promoters from SV40, the CMV immediate early promoter, the adenovirus early and late promoters, and retrovirus long-terminal repeats.

[0407] In addition to control regions that promote transcription, expression vectors may also include regions that modulate transcription, such as repressor binding sites and enhancers. Examples include the SV40 enhancer, the cytomegalovirus immediate early enhancer, polyoma enhancer, adenovirus enhancers, and retrovirus LTR enhancers.

[0408] In addition to containing sites for transcription initiation and control, expression vectors can also contain sequences necessary for transcription termination and, in the transcribed region, a ribosome-binding site for translation. Other regulatory control elements for expression include initiation and termination codons as well as polyadenylation signals. A person of ordinary skill in the art would be aware of the numerous regulatory sequences that are useful in expression vectors. See, e.g., Sambrook and Russell, Molecular Cloning: A Laboratory Manual, Cold Spring Harbor Laboratory Press, N.Y. (2000).

[0409] A variety of expression vectors can be used to express a SNP-containing nucleic acid molecule. Such vectors include chromosomal, episomal, and virus-derived vectors, for example, vectors derived from bacterial plasmids, from bacteriophage, from yeast episomes, from yeast chromosomal elements, including yeast artificial chromosomes, from viruses such as baculoviruses, papovaviruses such as SV40, Vaccinia viruses, adenoviruses, poxviruses, pseudorabies viruses, and retroviruses. Vectors can also be derived from combinations of these sources such as those derived from plasmid and bacteriophage genetic elements, e.g., cosmids and phagemids. Appropriate cloning and expression vectors for prokaryotic and eukaryotic hosts are described in Sambrook and Russell, Molecular Cloning: A Laboratory Manual, Cold Spring Harbor Laboratory Press, N.Y. (2000).

[0410] The regulatory sequence in a vector may provide constitutive expression in one or more host cells (e.g., tissue specific expression) or may provide for inducible expression in one or more cell types such as by temperature, nutrient additive, or exogenous factor, e.g., a hormone or other ligand. A variety of vectors that provide constitutive or inducible expression of a nucleic acid sequence in prokaryotic and eukaryotic host cells are well known to those of ordinary skill in the art.

[0411] A SNP-containing nucleic acid molecule can be inserted into the vector by methodology well-known in the art. Generally, the SNP-containing nucleic acid molecule that will ultimately be expressed is joined to an expression vector by cleaving the SNP-containing nucleic acid molecule and the expression vector with one or more restriction enzymes and then ligating the fragments together. Procedures for restriction enzyme digestion and ligation are well known to those of ordinary skill in the art.

[0412] The vector containing the appropriate nucleic acid molecule can be introduced into an appropriate host cell for propagation or expression using well-known techniques. Bacterial host cells include, but are not limited to, Escherichia coli, Streptomyces spp., and Salmonella typhimurium. Eukaryotic host cells include, but are not limited to, yeast, insect cells such as Drosophila spp., animal cells such as COS and CHO cells, and plant cells.

[0413] As described herein, it may be desirable to express the variant peptide as a fusion protein. Accordingly, the invention provides fusion vectors that allow for the production of the variant peptides. Fusion vectors can, for example, increase the expression of a recombinant protein, increase the solubility of the recombinant protein, and aid in the purification of the protein by acting, for example, as a ligand for affinity purification. A proteolytic cleavage site may be introduced at the junction of the fusion moiety so that the desired variant peptide can ultimately be separated from the fusion moiety. Proteolytic enzymes suitable for such use include, but are not limited to, factor Xa, thrombin, and enterokinase. Typical fusion expression vectors include pGEX (Smith et al., Gene 67:31-40 (1988)), pMAL (New England Biolabs, Beverly, Mass.) and pRIT5 (Pharmacia, Piscataway, N.J.) which fuse glutathione S-transferase (GST), maltose E binding protein, or protein A, respectively, to the target recombinant protein. Examples of suitable inducible non-fusion E. coli expression vectors include pTrc (Amann et al., Gene 69:301-315 (1988)) and pET 11d (Studier et al., Gene Expression Technology: Methods in Enzymology 185:60-89 (1990)).

[0414] Recombinant protein expression can be maximized in a bacterial host by providing a genetic background wherein the host cell has an impaired capacity to proteolytically cleave the recombinant protein (S. Gottesman, Gene Expression Technology: Methods in Enzymology 185:119-128, Academic Press, Calif. (1990)). Alternatively, the sequence of the SNP-containing nucleic acid molecule of interest can be altered to provide preferential codon usage for a specific host cell, for example, E. coli. Wada et al., Nucleic Acids Res 20:2111-2118 (1992).

[0415] The SNP-containing nucleic acid molecules can also be expressed by expression vectors that are operative in yeast. Examples of vectors for expression in yeast (e.g., S. cerevisiae) include pYepSec 1 (Baldari et al., EMBO J. 6:229-234 (1987)), pMFa (Kurjan et al., Cell 30:933-943 (1982)), pJRY88 (Schultz et al., Gene 54:113-123 (1987)), and pYES2 (Invitrogen Corporation, San Diego, Calif.).

[0416] The SNP-containing nucleic acid molecules can also be expressed in insect cells using, for example, baculovirus expression vectors. Baculovirus vectors available for expression of proteins in cultured insect cells (e.g., Sf 9 cells) include the pAc series (Smith et al., Mol Cell Biol 3:2156-2165 (1983)) and the pVL series (Lucklow et al., Virology 170:31-39 (1989)).

[0417] In certain embodiments of the invention, the SNP-containing nucleic acid molecules described herein are expressed in mammalian cells using mammalian expression vectors. Examples of mammalian expression vectors include pCDM8 (B. Seed, Nature 329:840 (1987)) and pMT2PC (Kaufman et al., EMBO J. 6:187-195 (1987)).

[0418] The invention also encompasses vectors in which the SNP-containing nucleic acid molecules described herein are cloned into the vector in reverse orientation, but operably linked to a regulatory sequence that permits transcription of antisense RNA. Thus, an antisense transcript can be produced to the SNP-containing nucleic acid sequences described herein, including both coding and non-coding regions. Expression of this antisense RNA is subject to each of the parameters described above in relation to expression of the sense RNA (regulatory sequences, constitutive or inducible expression, tissue-specific expression).

[0419] The invention also relates to recombinant host cells containing the vectors described herein. Host cells therefore include, for example, prokaryotic cells, lower eukaryotic cells such as yeast, other eukaryotic cells such as insect cells, and higher eukaryotic cells such as mammalian cells.

[0420] The recombinant host cells can be prepared by introducing the vector constructs described herein into the cells by techniques readily available to persons of ordinary skill in the art. These include, but are not limited to, calcium phosphate transfection, DEAE-dextran-mediated transfection, cationic lipid-mediated transfection, electroporation, transduction, infection, lipofection, and other techniques such as those described in Sambrook and Russell, Molecular Cloning: A Laboratory Manual, Cold Spring Harbor Laboratory, Cold Spring Harbor Laboratory Press, N.Y. (2000).

[0421] Host cells can contain more than one vector. Thus, different SNP-containing nucleotide sequences can be introduced in different vectors into the same cell. Similarly, the SNP-containing nucleic acid molecules can be introduced either alone or with other nucleic acid molecules that are not related to the SNP-containing nucleic acid molecules, such as those providing trans-acting factors for expression vectors. When more than one vector is introduced into a cell, the vectors can be introduced independently, co-introduced, or joined to the nucleic acid molecule vector.

[0422] In the case of bacteriophage and viral vectors, these can be introduced into cells as packaged or encapsulated virus by standard procedures for infection and transduction. Viral vectors can be replication-competent or replication-defective. In the case in which viral replication is defective, replication can occur in host cells that provide functions that complement the defects.

[0423] Vectors generally include selectable markers that enable the selection of the subpopulation of cells that contain the recombinant vector constructs. The marker can be inserted in the same vector that contains the SNP-containing nucleic acid molecules described herein or may be in a separate vector. Markers include, for example, tetracycline or ampicillin-resistance genes for prokaryotic host cells, and dihydrofolate reductase or neomycin resistance genes for eukaryotic host cells. However, any marker that provides selection for a phenotypic trait can be effective.

[0424] While the mature variant proteins can be produced in bacteria, yeast, mammalian cells, and other cells under the control of the appropriate regulatory sequences, cell-free transcription and translation systems can also be used to produce these variant proteins using RNA derived from the DNA constructs described herein.

[0425] Where secretion of the variant protein is desired, which is difficult to achieve with multi-transmembrane domain containing proteins such as G-protein-coupled receptors (GPCRs), appropriate secretion signals can be incorporated into the vector. The signal sequence can be endogenous to the peptides or heterologous to these peptides.

[0426] Where the variant protein is not secreted into the medium, the protein can be isolated from the host cell by standard disruption procedures, including freeze/thaw, sonication, mechanical disruption, use of lysing agents, and the like. The variant protein can then be recovered and purified by well-known purification methods including, for example, ammonium sulfate precipitation, acid extraction, anion or cationic exchange chromatography, phosphocellulose chromatography, hydrophobic-interaction chromatography, affinity chromatography, hydroxylapatite chromatography, lectin chromatography, or high performance liquid chromatography.

[0427] It is also understood that, depending upon the host cell in which recombinant production of the variant proteins described herein occurs, they can have various glycosylation patterns, or may be non-glycosylated, as when produced in bacteria. In addition, the variant proteins may include an initial modified methionine in some cases as a result of a host-mediated process.

[0428] For further information regarding vectors and host cells, see Current Protocols in Molecular Biology, John Wiley & Sons, N.Y.

[0429] Uses of Vectors and Host Cells, and Transgenic Animals

[0430] Recombinant host cells that express the variant proteins described herein have a variety of uses. For example, the cells are useful for producing a variant protein that can be further purified into a preparation of desired amounts of the variant protein or fragments thereof. Thus, host cells containing expression vectors are useful for variant protein production.

[0431] Host cells are also useful for conducting cell-based assays involving the variant protein or variant protein fragments, such as those described above as well as other formats known in the art. Thus, a recombinant host cell expressing a variant protein is useful for assaying compounds that stimulate or inhibit variant protein function. Such an ability of a compound to modulate variant protein function may not be apparent from assays of the compound on the native/wild-type protein, or from cell-free assays of the compound. Recombinant host cells are also useful for assaying functional alterations in the variant proteins as compared with a known function.

[0432] Genetically-engineered host cells can be further used to produce non-human transgenic animals. A transgenic animal is preferably a non-human mammal, for example, a rodent, such as a rat or mouse, in which one or more of the cells of the animal include a transgene. A transgene is exogenous DNA containing a SNP of the present invention which is integrated into the genome of a cell from which a transgenic animal develops and which remains in the genome of the mature animal in one or more of its cell types or tissues. Such animals are useful for studying the function of a variant protein in vivo, and identifying and evaluating modulators of variant protein activity. Other examples of transgenic animals include, but are not limited to, non-human primates, sheep, dogs, cows, goats, chickens, and amphibians. Transgenic non-human mammals such as cows and goats can be used to produce variant proteins which can be secreted in the animal's milk and then recovered.

[0433] A transgenic animal can be produced by introducing a SNP-containing nucleic acid molecule into the male pronuclei of a fertilized oocyte, e.g., by microinjection or retroviral infection, and allowing the oocyte to develop in a pseudopregnant female foster animal. Any nucleic acid molecules that contain one or more SNPs of the present invention can potentially be introduced as a transgene into the genome of a non-human animal.

[0434] Any of the regulatory or other sequences useful in expression vectors can form part of the transgenic sequence. This includes intronic sequences and polyadenylation signals, if not already included. A tissue-specific regulatory sequence(s) can be operably linked to the transgene to direct expression of the variant protein in particular cells or tissues.

[0435] Methods for generating transgenic animals via embryo manipulation and microinjection, particularly animals such as mice, have become conventional in the art and are described, for example, in U.S. Pat. Nos. 4,736,866 and 4,870,009, both by Leder et al.; U.S. Pat. No. 4,873,191 by Wagner et al., and in B. Hogan, Manipulating the Mouse Embryo, Cold Spring Harbor Laboratory Press, N.Y. (1986). Similar methods are used for production of other transgenic animals. A transgenic founder animal can be identified based upon the presence of the transgene in its genome and/or expression of transgenic mRNA in tissues or cells of the animals. A transgenic founder animal can then be used to breed additional animals carrying the transgene. Moreover, transgenic animals carrying a transgene can further be bred to other transgenic animals carrying other transgenes. A transgenic animal also includes a non-human animal in which the entire animal or tissues in the animal have been produced using the homologously recombinant host cells described herein.

[0436] In another embodiment, transgenic non-human animals can be produced which contain selected systems that allow for regulated expression of the transgene. One example of such a system is the cre/loxP recombinase system of bacteriophage P1. Lakso et al., PNAS 89:6232-6236 (1992). Another example of a recombinase system is the FLP recombinase system of S. cerevisiae. O'Gorman et al., Science 251:1351-1355 (1991). If a cre/loxP recombinase system is used to regulate expression of the transgene, animals containing transgenes encoding both the Cre recombinase and a selected protein are generally needed. Such animals can be provided through the construction of “double” transgenic animals, e.g., by mating two transgenic animals, one containing a transgene encoding a selected variant protein and the other containing a transgene encoding a recombinase.

[0437] Clones of the non-human transgenic animals described herein can also be produced according to the methods described, for example, in I. Wilmut et al., Nature 385:810-813 (1997) and PCT International Publication Nos. WO 97/07668 and WO 97/07669. In brief, a cell (e.g., a somatic cell) from the transgenic animal can be isolated and induced to exit the growth cycle and enter Gₒ phase. The quiescent cell can then be fused, e.g., through the use of electrical pulses, to an enucleated oocyte from an animal of the same species from which the quiescent cell is isolated. The reconstructed oocyte is then cultured such that it develops to morula or blastocyst and then transferred to pseudopregnant female foster animal. The offspring born of this female foster animal will be a clone of the animal from which the cell (e.g., a somatic cell) is isolated.

[0438] Transgenic animals containing recombinant cells that express the variant proteins described herein are useful for conducting the assays described herein in an in vivo context. Accordingly, the various physiological factors that are present in vivo and that could influence ligand or substrate binding, variant protein activation, signal transduction, or other processes or interactions, may not be evident from in vitro cell-free or cell-based assays. Thus, non-human transgenic animals of the present invention may be used to assay in vivo variant protein function as well as the activities of a therapeutic agent or compound that modulates variant protein function/activity or expression. Such animals are also suitable for assessing the effects of null mutations (i.e., mutations that substantially or completely eliminate one or more variant protein functions).

[0439] For further information regarding transgenic animals, see Houdebine, “Antibody manufacture in transgenic animals and comparisons with other systems,” Curr Opin Biotechnol 13(6):625-9 (December 2002); Petters et al., “Transgenic animals as models for human disease,” Transgenic Res 9(4-5):347-51, discussion 345-6 (2000); Wolf et al., “Use of transgenic animals in understanding molecular mechanisms of toxicity,” J Pharm Pharmacol 50(6):567-74 (June 1998); Echelard, “Recombinant protein production in transgenic animals,” Curr Opin Biotechnol 7(5):536-40 (October 1996); Houdebine, “Transgenic animal bioreactors,” Transgenic Res 9(4-5):305-20 (2000); Pirity et al., “Embryonic stem cells, creating transgenic animals,” Methods Cell Biol 57:279-93 (1998); and Robl et al., “Artificial chromosome vectors and expression of complex proteins in transgenic animals,” Theriogenology 59(1):107-13 (January 2003).

### EXAMPLES

[0440] The following examples are offered to illustrate, but not limit, the claimed invention.

### Example 1

### SNPs Associated with Response to Statins for Reducing VT Risk

[0441] 27 SNPs were identified that had a significant p(interaction) for statin*SNP of <0.05 (Wald test) for the statin*SNP interaction term in the MEGA sample set (ModelFormula: VTE˜SNP+ statin user or nonuser+SNP*statin+age+sex). These 27 SNPs are provided in Table 4. Further, Table 6 provides additional SNPs with P(int)<0.1. Thus, the SNPs provided in Tables 4 and 6 can be assayed to determine whether statin treatment will reduce an individual's risk for VT.

[0442] Analysis of SNPs in Statin Subgroups (Statin Users Vs. Statin Nonusers)

[0443] 75 SNPs genotyped in MEGA had an additive P<0.05 for VT risk in the statin nonusers subgroup. Comparing the risk of VT in the statin users subgroup for these SNPs identifies individuals at risk for VT that benefit from statin therapy and individuals at risk for VT that do not benefit from statin therapy. These 75 SNPs are provided in Table 5. Thus, the SNPs provided in Table 5 can be assayed to determine whether statin treatment will reduce an individual's risk for VT.

[0444] MEGA Sample Set

[0445] The sample sets used in the present analysis were from a large population-based case-control study referred to as the Multiple Environmental and Genetic Assessment of risk factors for venous thrombosis (MEGA study) (Koster et al., Lancet 1993; 342(8886-8887):1503-1506 and Blom et al., JAMA 2005; 293(6):715-722), including both the MEGA-1 and MEGA-2 subsets of the MEGA study. The MEGA study was approved by the Medical Ethics Committee of the Leiden University Medical Center, Leiden, The Netherlands. All participants gave informed consent to participate.

[0446] Collection and ascertainment of VT events in MEGA has been described previously (Blom et al., JAMA 2005; 293(6):715-722; van Stralen et al., Arch Intern Med 2008; 168(1):21-26). MEGA enrolled consecutive patients aged 18 to 70 years who presented with their first diagnosis of VT (deep vein thrombosis of the leg, venous thrombosis of the arm, or pulmonary embolism) at any of six anticoagulation clinics in The Netherlands between Mar. 1, 1999 and May 31, 2004. Control subjects included partners of patients and random population control subjects frequency-matched on age and sex to the patient group. Participants completed a questionnaire on risk factors for VT and medication use (including statins), and provided a blood or buccal swab sample. Seven different statins were used by statin users, which are all combined in the current analysis, however 94% of statin users used simvastatin, pravastatin, or atorvastatin. The questionnaire included an item on parent birth country as a proxy for ethnicity.

[0447] Two SNPs in particular that were identified in MEGA as being significantly associated with statin response for reducing VT risk were in the F11 gene: F11 SNP rs2036914 (see Tables 4 and 5) and F11 SNP rs2289252 (see Table 5).

### Example 2

### Association of F11 SNPs rs2036914 and rs2289252 with Response to Statin Treatment for Reducing VT Risk

[0448] The MEGA study was analyzed to determine whether carriers of the risk alleles of F11 SNPs rs2289252 and rs2036914, compared with noncarriers, were at increased risk for VT among statin users and also among nonusers.

[0449] The MEGA study recruited consecutive patients aged 18 to 70 years with a first diagnosis of VT (deep vein thrombosis of the leg, venous thrombosis of the arm, or pulmonary embolism) from six anticoagulation clinics in the Netherlands between Mar. 1, 1999 and May 31, 2004 (Blom et al., JAMA. 2005; 293: 715-22). Partners of patients were invited to take part as control participants. Additional controls were recruited from the same geographical region by a random digit dialing method and were frequency-matched to patients by age and sex (Chinthammitr et al., J Thromb Haemost. 2006; 4: 2587-92). Information on risk factors for VT and medication use (including statins) prior to their VT event for cases or prior to enrollment for controls was obtained from questionnaires completed by the participants. Seven different statins were used by statin users, which are all combined in the current analysis, however 94% of statin users used simvastatin, pravastatin, or atorvastatin. Participants also provided a blood or buccal swab sample for DNA extraction. Genotypes were determined in a core laboratory that was blinded to case-control status (Germer et al., Genome Res. 2000; 10: 258-66). All study participants provided written informed consent. The MEGA study was approved by the Medical Ethics Committee of the Leiden University Medical Center, Leiden, The Netherlands.

[0450] DNA was available for 9803 participants. Because active cancer is a strong risk factor for VT that might mask other associations, participants with a known malignancy or missing malignancy status were excluded from the current analysis (n=708); participants without medication use information were also excluded (n=204); thus, 3698 cases with VT and 4473 controls with no history of VT were investigated in the current study. Of these 8171 study participants, 384 (5%) were self-reported statin users (125 cases and 259 controls). Logistic regression models that adjusted for age and sex were used to assess association between genotype and VT in statin users and nonusers separately using SAS software (version 9.1) (SAS Institute Inc., Cary, N.C., USA).

[0451] Cases and controls did not differ appreciably in mean age [cases, 47.2 years (standard deviation, 12.9); controls, 47.6 years (standard deviation, 12.3)] or sex (45.6% of cases and 47.2% of controls were male). In the controls of MEGA, the genotypes frequencies for rs2289252 were 17.1% (TT), 47.1% (TC) and 35.8% (CC) and for rs2036914 were 27.4% (CC), 49.3% (CT) and 23.3% (TT). Genotype distributions for the 2 SNPs in MEGA did not deviate from Hardy-Weinberg expectations among controls (P>0.25) (Weir, Genetic Data Analysis II. Sunderland: Sinauer Associates Inc., 1996). The linkage disequilibrium between rs2289252 and rs2036914 was moderate (r²=0.38) in the HapMap CEPH population (Utah residents with ancestry from northern and western Europe) (Frazer et al., Nature. 2007; 449: 851-61).

[0452] Among statin nonusers of MEGA, the rs2289252 and rs2036914 SNPs were associated with VT (FIGURE): for participants carrying two risk alleles, compared with those carrying no risk alleles, the OR for VT was 1.83 (95% CI, 1.60 to 2.08) for rs2289252 and 1.75 (95% CI, 1.54 to 1.98) for rs2036914. For participants with one risk allele, the OR was 1.39 (95% CI, 1.26 to 1.55) for rs2289252 and 1.30 (95% CI, 1.15 to 1.46) for rs2036914, again compared with participants carrying no risk alleles.

[0453] In contrast, among statin users, carriers of rs2289252 were not at increased risk for VT. For participants carrying two risk alleles, compared with those carrying no risk alleles, the OR for VT was 1.06 (95% CI, 0.66 to 1.71); for those carrying one risk allele the OR was 1.10 (95% CI, 0.57 to 2.10); and for carriers of 1 or 2 risk alleles, the OR was 1.07 (95% CI, 0.68 to 1.68). Similarly, among statin users, carriers of two rs2036914 risk alleles were also not at increased risk for VT: the OR was 1.03 (95% CI, 0.53 to 1.99).

[0454] It was also determined whether the association between factor V Leiden and VT differed according to statin use. For factor V Leiden, the ORs for VT were not appreciably different between statin users and nonusers. Among statin users, for carriers of factor V Leiden, compared with noncarriers, the OR was 4.94 (95% CI, 2.37 to 10.30) and among nonusers the OR was 3.64 (95% CI, 3.09 to 4.29).

[0455] Thus, among MEGA participants who were statin nonusers, it was determined that carriers compared with noncarriers of the risk alleles of rs2289252 and rs2036914 had an increased risk for VT. In contrast, among statin users, carriers of two risk alleles were not at increased risk for VT.

[0456] Although anticoagulant therapy reduces the risk for VT events by about 80% (Dentali et al., Ann Intern Med. 2007; 146: 278-88), anticoagulant therapy also causes life-threatening bleeding events (Shireman et al., Chest. 2006; 130: 1390-6; Wittkowsky et al., Arch Intern Med. 2005; 165: 703; and Buresly et al., Arch Intern Med. 2005; 165: 784-9). Thus, statin therapy may be a useful treatment option, particularly when there are concerns about bleeding risk or when the risk of VT is modest. The genetic risk for VT from F11 SNPs rs2036914 and rs2289252 exposes patients to a modest lifelong increase in risk for VT, and in this study of MEGA, the risk for VT in carriers of two alleles of the F11 variants was attenuated by statin use.

[0457] Thus, in conclusion, the association of each of F11 SNPs rs2036914 and rs2289252 with statin response for reducing VT risk in MEGA is shown in the FIGURE. The FIGURE shows risk of VT according to statin use for rs2289252, rs2036914, and Factor V Leiden genotypes. The odds ratios in the FIGURE (shown with 95% confidence intervals) were adjusted for sex and age.

[0458] As shown in the FIGURE, individuals who were T/T homozygotes or T/C heterozygotes at F11 SNP rs2289252 and who used statins had a reduced risk for VT relative to individuals of the same genotype who did not use statins (lower odds ratios of 1.06 for statin users vs. 1.83 for statin nonusers for T/T homozygous individuals, and lower odds ratio of 1.10 for statin users vs. 1.39 for statin nonusers for T/C heterozygous individuals).

[0459] The FIGURE also shows that individuals who were C/C homozygotes at F11 SNP rs2036914 and who used statins had a reduced risk for VT relative to individuals of the same genotype who did not use statins (lower odds ratio of 1.03 for statin users vs. 1.75 for statin nonusers for C/C homozygous individuals).

[0460] Factor XI Protein Levels

[0461] In addition to being associated with VT risk, F11 SNPs rs2036914 and rs2289252 are also associated with factor XI protein levels, and increased factor XI protein levels are associated with increased VT risk (although F11 SNPs rs2036914 and rs2289252 are associated with factor XI protein levels, both SNPs remain significantly associated with VT risk after adjustment for factor XI levels). Since increased factor XI protein levels are associated with increased VT risk, statin therapy may reduce VT risk by inhibiting factor XI levels associated with the risk alleles of F11 SNPs rs2036914 and rs2289252, or by inhibiting the mechanism by which elevated factor XI levels increase VT risk.

[0462] Accordingly, in certain exemplary embodiments, a genetic test that assays one or both of F11 SNPs rs2036914 or rs2289252 (or one or more other SNPs in high LD with either of these F11 SNP) is used in conjunction with a test that measures factor XI protein levels (e.g., in serum or plasma) to identify patients who will have a greater likelihood of VT event reduction (i.e., reduced VT risk) from statin therapy (i.e., increased statin benefit). In further embodiments, a test that measures factor XI protein levels can be used in combination with a genetic test that assays any of the SNPs disclosed herein for VT risk and/or response to statin treatment for reducing VT risk.

### Example 3

### Additional Analysis of SNPs Associated with Response to Statins for Reducing VT Risk

[0463] Table 7 provides the results from an additional analysis for SNPs associated with response to statins for reducing risk of VT. Table 7 provides SNPs that were significantly associated with response to statins for reducing risk of VT in the MEGA substudy of statin users.

[0464] In this Example, the MEGA study was analyzed to determine whether certain genotypes of SNPs were at increased risk for VT among statin users and also among statin nonusers. The MEGA study is described above in Examples 1 and 2. In the additional analysis described here in Example 3, the results of which are provided in Table 7, a subset of controls were randomly selected rather that using all controls (all cases were used) from MEGA, since controls greatly outnumbered cases in MEGA.

[0465] Description of Statin Substudy of MEGA DNA was available for 9803 participants. Because active cancer is a strong risk factor for VT that might mask other associations, participants with a known malignancy or missing malignancy status were excluded from the current analysis (n=708); participants without medication use information were also excluded (n=204); thus, 3698 cases with VT and 4473 controls with no history of VT were investigated in the current study. Of the 3698 cases with VT, 125 cases were self-reported statin users and, of the 4473 controls, 257 were self-reported statin users. Because only 384 (5%) of the total cohort were statin users, 539 cases and 607 controls were randomly selected from among the statin nonusers to genotype and use in the analysis. Logistic regression models that adjusted for age and sex were used to assess association between genotype and VT in statin users and nonusers separately using SAS software (section of Table 7 labeled “Statin response by genotype group”). The association between genotype and VT was assessed in statin users (section of Table 7 labeled “Risk of VT in statin use group”) and nonusers (section of Table 7 labeled “Risk of VT in no statin use group”) separately using regression models that adjusted for age and sex using SAS software (version 9.1) (SAS Institute Inc., Cary, N.C., USA).

### Example 4

### SNPs Associated with Risk for VT, Particularly Recurrent VT

[0466] An analysis was carried out to identify SNPs associated with VT, particularly recurrent VT. These SNPs are provided in Table 8. Specifically, Table 8 provides 33 SNPs associated with VT risk in a MEGA case-control study and also with recurrent VT risk in a MEGA recurrent VT prospective study. The MEGA study/sample set is described above in Examples 1 and 2.

[0467] Study Design

[0468] Recurrent VT Study

[0469] The effect of genetic variants on the risk of recurrent VT in MEGA was assessed. Patients that had a primary VT (either DVT of the leg, PE, or both) were included in the current study; patients with DVT of the arm only were excluded from the study (Flinterman et al., “Recurrent thrombosis and survival after a first venous thrombosis of the upper extremity”, Circulation. 2008; 118: 1366-72). Since active cancer is a risk factor for VT, participants were excluded who had malignancy or who had an unknown malignancy status at baseline of the original MEGA study (no information regarding cancer was available during the follow-up study of recurrent VT). 3,824 patients with a first VT from the MEGA study were followed for recurrent VT events over a mean of five years. Among these patients, 137 patients were lost to follow-up and excluded from the analysis. Of these 3,686 participants included in the current study, 565 had a recurrent VT (Table 10).

[0470] Primary VT Study

[0471] The MEGA primary VT study included 3824 cases and 4672 controls (Table 10). Individuals with a history of malignant disorders were excluded.

TABLE 10
Characteristics of cases and controls in MEGA

| | Primary VT | | | Recurrent VT | | |
|---|---|---|---|---|---|---|
| | | | p | | No | |
| Characteristic | Case | Control | Value | Event | Event | p Value |
| Number of | 3824 | 4672 | | 565 | 3121 | |
| patients | | | | | | |
| Men | 1734 | 2203 | 0.11 | 366 | 1293 | <0.0001 |
| Mean age (SD) | 48 (13) | 48 (12) | 0.98 | 50 (13) | 47 (13) | <0.0001 |
| in yrs | | | | | | |

[0472] Examination and Laboratory Measures

[0473] Data collection methods for the recurrent VT study are described in Flinterman et al. (“Recurrent thrombosis and survival after a first venous thrombosis of the upper extremity”, Circulation. 2008; 118: 1366-72). Briefly, in 2006, an inquiry form was sent to those patients who had a primary VT and who had initially agreed to participate in a follow-up study. The patients were asked if they had had another VT event in any location since their primary VT event and were asked to answer a follow-up questionnaire. Recurrences were included when confirmed by ultrasound, contrast venography, or computed tomography according to the discharge letters (Flinterman et al., “Recurrent thrombosis and survival after a first venous thrombosis of the upper extremity”, Circulation. 2008; 118: 1366-72). Information on patients with active cancer at the time of first VT was obtained from the baseline questionnaire and from the discharge letters of the first VT (Blom et al., “Malignancies, prothrombotic mutations, and the risk of venous thrombosis”, JAMA. 2005; 293: 715-22).

[0474] Genetic Analysis

[0475] Blood samples were taken at least three months after discontinuation of vitamin K antagonist treatment for the first thrombotic event. DNA was collected with buccal swabs from patients who were unable to give a blood sample and from all patients who were included beginning in June 2002 (Blom et al., “Malignancies, prothrombotic mutations, and the risk of venous thrombosis”, JAMA. 2005; 293: 715-22). SNP genotypes were determined by allele-specific real-time PCR (Germer et al., “High-throughput SNP allele-frequency determination in pooled DNA samples by kinetic PCR”, Genome Res. 2000; 10: 258-66) in a core laboratory; genotype distributions did not deviate from Hardy Weinberg expectations among controls (P_{exact}>0.01) (Weir, Genetic Data Analysis II. Sunderland: Sinauer Associates Inc., 1996).

[0476] Statistical Analysis

[0477] Recurrent VT Analysis

[0478] Cumulative incidence was estimated by the Kaplan-Meier technique. Incidence rates were the number of new VT events over the total number of person-years. Person-years were calculated from date of first VT event and from discontinuation of the initial vitamin K antagonist treatment until recurrent VT event, death, or end of study, whichever came first. Participants who died during follow-up of a cause other than VT were censored at the date of death. Patients who were not able to complete the inquiry form were censored at their last contact and considered study withdrawals. The end-of-study date was Oct. 1, 2006. Hazard ratios (HRs) were estimated with a Cox proportional-hazards model after patients had discontinued vitamin K antagonist treatment. Adjustments were made for age and sex. No adjustment was made for race because the follow-up study included 95% whites. False discovery rate estimates were used to control for false-positive associations among the group of SNPs in the recurrent VT study (Benjamini et al., Journal of the Royal Statistical Society. 1995; Serials B: 1289-300). Analyses were done using SAS version 9 (SAS Institute Inc, Cary, N.C.) and SPSS for Windows, 14.0.2 (SPSS Inc, Chicago, Ill.). False discovery rates were estimated using the 2-sided, unadjusted P value from the additive model.

[0479] Primary VT Analysis

[0480] Logistic regression models were used to calculate the odds ratio (OR), 95% confidence interval (95% CI), and 2-sided P value for the association of each SNP with VT and to adjust for age and sex. For each SNP, the OR per genotype was calculated relative to noncarriers of the risk allele. For SNPs on the X chromosome, the analysis was conducted separately in men and women. Analyses were done using SAS version 9 (SAS Institute Inc, Cary, N.C.) and SPSS for Windows, 14.0.2 (SPSS Inc, Chicago, Ill.).

[0481] Results

[0482] The SNPs identified as being associated with VT, particularly recurrent VT, are provided in Table 8.

### Example 5

### SNPs Associated with Risk for VT

[0483] Table 9 provides 10 SNPs that were associated with VT risk in the MEGA-1 subset of the MEGA study. These SNPs were specifically associated with primary VT risk in MEGA-1, and are also useful for determining risk for recurrent VT.

[0484] The MEGA study, including the MEGA-1 subset, is described in Blom et al., JAMA 2005; 293(6):715-722 (incorporated herein by reference in its entirety), as well as in Examples 1 and 2 above.

### Example 6

### Four-Marker Panel for Determining Risk of VT, Particularly Recurrent VT

[0485] Four of the SNPs identified herein as being associated with recurrent VT, as well as primary VT, were combined into a panel for determining VT risk, particularly recurrent VT risk. The panel (referred to herein as the “four-marker panel”, or “GRS” in Tables 11-12) comprised the following four SNPs (genes): rs6025 (F5), rs2066865 (FGG), rs8176719 (ABO), and rs2036914 (F11).

[0486] Risk genotypes for each of these four SNPs are AG+AA for rs6025 (F5), GT+GG for rs8176719 (ABO), AG+AA for rs2066865 (FGG), and CT+CC for rs2036914 (F11).

[0487] Equally weighting these four SNPs, it was found that the individuals in the top quartile (>90^{th} percentile) had a two-fold increase (HR=2.04) in risk for recurrent VT compared with the bottom quartile group (<35th percentile) (see Table 11).

TABLE 11
Association of four-marker panel with recurrent VT

| GRS | | | | | |
|---|---|---|---|---|---|
| Percentile | Events | Total | HR | 95% CI | P value |
| >=90 | 81 | 361 | 2.04 | 1.56-2.67 | <0.0001 |
| >35 and <90 | 326 | 1998 | 1.42 | 1.18-1.72 | 0.0003 |
| <=35 | 158 | 1327 | Ref | | |

Percentile >= 90: Above 90th percentile (based on number of risk allele carriers)

[0488] Further, using the four-marker panel in combination with an individual's gender, it was found that individuals in the top quartile (>84th percentile) had a three-fold increase (HR=3.1) in risk for recurrent VT compared with the bottom quartile group (<43th percentile) (see Table 12).

TABLE 12
Association of four-marker panel, in combination
with gender, with recurrent VT

| GRS | | | | | |
|---|---|---|---|---|---|
| Percentile | Events | Total | HR | 95% CI | P value |
| >=84 | 155 | 575 | 3.1 | 2.47-3.91 | <0.0001 |
| >43 and <84 | 267 | 1523 | 2.05 | 2.05-1.67 | <0.0001 |
| <=43 | 143 | 1588 | Ref | | |

[0489] Thus, this four-marker panel is particularly useful for determining an individual's risk for developing VT, particularly recurrent VT (as well as primary VT).

[0490] In further exemplary embodiments of the four-marker panel, additional markers are assayed in combination with the four markers (particularly additional markers selected from those disclosed herein). In further exemplary embodiments of the four-marker panel, any one, two, or three of the four markers (F5 SNP rs6025, FGG SNP rs2066865, ABO rs8176719, and F11 SNP rs2036914) are assayed, optionally in combination with additional markers (particularly additional markers selected from those disclosed herein). For example, other markers can be substituted for any one or more markers of the four-marker panel. In certain exemplary embodiments, one or more other SNPs in the F11 gene (such as SNP rs2289252) are substituted for F11 SNP rs2036914 (or assayed in addition to rs2036914). In certain embodiments, PTPN21 SNP rs2274736 (disclosed herein) is added to the four-marker panel or substituted in place of one of the markers of the four-marker panel. Additionally, in certain embodiments, F2 SNP rs 1799963 is added to the four-marker panel or substituted in place of one of the markers of the four-marker panel.

[0491] In additional embodiments, one or more protein biomarkers can be assayed in combination with the four-marker panel, or a subset of the four-marker panel (and/or any of the other SNPs disclosed herein). For example, measurement of factor XI protein levels can be assayed in combination with the four-marker panel, or can be substituted in place of assaying F11 SNP rs2036914 (or F11 SNP rs2289252), or can be measured in conjunction with any of the other SNPs disclosed herein.

[0492] Similarly, measurement of factor VIII protein levels can be assayed in combination with the four-marker panel or can be substituted in place of assaying ABO SNP rs8176719 (or can be measured in conjunction with any of the other SNPs disclosed herein). ABO SNP rs8176719 is associated with factor VIII protein levels, and factor VIII protein levels are associated with VT risk.

[0493] Fibrinogen gamma and/or fibrinogen gamma primer protein levels can also be measured in conjunction with the four-marker panel or a subset thereof (or can be measured in conjunction with any of the other SNPs disclosed herein).

### Example 7

### LD SNPs Associated with VT Risk and Statin Response

[0494] Another investigation was conducted to identify additional SNPs that are calculated to be in linkage disequilibrium (LD) with certain “interrogated SNPs” that have been found to be associated with VT risk and/or response to statin treatment (particularly for reducing the risk of VT), as described herein and shown in the tables. The interrogated SNPs are shown in column 1 (which indicates the hCV identification numbers of each interrogated SNP) and column 2 (which indicates the public rs identification numbers of each interrogated SNP) of Table 3. The methodology is described earlier in the instant application. To summarize briefly, the power threshold (7) was set at an appropriate level, such as 51%, for detecting disease association using LD markers. This power threshold is based on equation (31) above, which incorporates allele frequency data from previous disease association studies, the predicted error rate for not detecting truly disease-associated markers, and a significance level of 0.05. Using this power calculation and the sample size, a threshold level of LD, or r² value, was derived for each interrogated SNP (, equations (32) and (33) above). The threshold r² value is the minimum value of linkage disequilibrium between the interrogated SNP and its LD SNPs possible such that the non-interrogated SNP still retains a power greater or equal to T for detecting disease association.

[0495] Based on the above methodology, LD SNPs were found for the interrogated SNPs. Several exemplary LD SNPs for the interrogated SNPs are listed in Table 3; each LD SNP is associated with its respective interrogated SNP. Also shown are the public SNP IDs (rs numbers) for the interrogated and LD SNPs, when available, and the threshold r² value and the power used to determine this, and the r² value of linkage disequilibrium between the interrogated SNP and its corresponding LD SNP. As an example in Table 3, the interrogated SNP rs2066865 (hCV11503414) was calculated to be in LD with rs2066864 (hCV11503416) at an r² value of 1, based on a 51% power calculation, thus establishing the latter SNP as a marker associated with statin response as well.

[0496] In general, the threshold r_{T}² value can be set such that one of ordinary skill in the art would consider that any two SNPs having an r² value greater than or equal to the threshold r_{T}² value would be in sufficient LD with each other such that either SNP is useful for the same utilities, such as determining an individual's response to statin treatment. For example, in various embodiments, the threshold r_{T}² value used to classify SNPs as being in sufficient LD with an interrogated SNP (such that these LD SNPs can be used for the same utilities as the interrogated SNP, for example) can be set at, for example, 0.7, 0.75, 0.8, 0.85, 0.9, 0.95, 0.96, 0.97, 0.98, 0.99, 1, etc. (or any other r² value in-between these values). Threshold r_{T}² values may be utilized with or without considering power or other calculations.

[0497] All publications and patents cited in this specification are herein incorporated by reference in their entirety. Modifications and variations of the described compositions, methods and systems of the invention will be apparent to those skilled in the art without departing from the scope and spirit of the invention. Although the invention has been described in connection with specific preferred embodiments and certain working examples, it should be understood that the invention as claimed should not be unduly limited to such specific embodiments. Indeed, various modifications of the above-described modes for carrying out the invention that are obvious to those skilled in the field of molecular biology, genetics and related fields are intended to be within the scope of the following claims.

TABLE 3

| Interrogated SNP | Interrogated rs | LD SNP | LD SNP rs | Power | Threshold r² | r² |
|---|---|---|---|---|---|---|
| hCV11503414 | rs2066865 | hCV11281035 | rs4583739 | 0.51 | 0.048174697 | 0.0695 |
| hCV11503414 | rs2066865 | hCV11503378 | rs1490655 | 0.51 | 0.048174697 | 0.0612 |
| hCV11503414 | rs2066865 | hCV11503379 | rs1490654 | 0.51 | 0.048174697 | 0.0677 |
| hCV11503414 | rs2066865 | hCV11503382 | rs1873369 | 0.51 | 0.048174697 | 0.257 |
| hCV11503414 | rs2066865 | hCV11503416 | rs2066864 | 0.51 | 0.048174697 | 1 |
| hCV11503414 | rs2066865 | hCV11503431 | rs2066861 | 0.51 | 0.048174697 | 1 |
| hCV11503414 | rs2066865 | hCV11503469 | rs2066854 | 0.51 | 0.048174697 | 0.9559 |
| hCV11503414 | rs2066865 | hCV11503470 | rs1800788 | 0.51 | 0.048174697 | 0.4341 |
| hCV11503414 | rs2066865 | hCV11852898 | rs6819508 | 0.51 | 0.048174697 | 0.0566 |
| hCV11503414 | rs2066865 | hCV11853353 | rs9995943 | 0.51 | 0.048174697 | 0.0864 |
| hCV11503414 | rs2066865 | hCV11853354 | rs10030235 | 0.51 | 0.048174697 | 0.0832 |
| hCV11503414 | rs2066865 | hCV11853357 | rs10033383 | 0.51 | 0.048174697 | 0.1091 |
| hCV11503414 | rs2066865 | hCV11853358 | rs10000511 | 0.51 | 0.048174697 | 0.0909 |
| hCV11503414 | rs2066865 | hCV11853362 | rs4696572 | 0.51 | 0.048174697 | 0.1012 |
| hCV11503414 | rs2066865 | hCV11853363 | rs4696573 | 0.51 | 0.048174697 | 0.0905 |
| hCV11503414 | rs2066865 | hCV11853373 | rs1907155 | 0.51 | 0.048174697 | 0.0947 |
| hCV11503414 | rs2066865 | hCV11853378 | rs1907154 | 0.51 | 0.048174697 | 0.163 |
| hCV11503414 | rs2066865 | hCV11853384 | rs12646456 | 0.51 | 0.048174697 | 0.163 |
| hCV11503414 | rs2066865 | hCV11853387 | rs1490683 | 0.51 | 0.048174697 | 0.217 |
| hCV11503414 | rs2066865 | hCV11853415 | rs1490653 | 0.51 | 0.048174697 | 0.0593 |
| hCV11503414 | rs2066865 | hCV11853416 | rs4346631 | 0.51 | 0.048174697 | 0.0664 |
| hCV11503414 | rs2066865 | hCV11853418 | rs12501998 | 0.51 | 0.048174697 | 0.0542 |
| hCV11503414 | rs2066865 | hCV11853419 | rs13151559 | 0.51 | 0.048174697 | 0.0542 |
| hCV11503414 | rs2066865 | hCV11853423 | rs3857093 | 0.51 | 0.048174697 | 0.0542 |
| hCV11503414 | rs2066865 | hCV11853424 | rs871541 | 0.51 | 0.048174697 | 0.0542 |
| hCV11503414 | rs2066865 | hCV11853483 | rs12644950 | 0.51 | 0.048174697 | 1 |
| hCV11503414 | rs2066865 | hCV11853489 | rs7681423 | 0.51 | 0.048174697 | 1 |
| hCV11503414 | rs2066865 | hCV11853496 | rs7654093 | 0.51 | 0.048174697 | 1 |
| hCV11503414 | rs2066865 | hCV11853631 | rs12651106 | 0.51 | 0.048174697 | 0.1612 |
| hCV11503414 | rs2066865 | hCV11853650 | rs9307922 | 0.51 | 0.048174697 | 0.1074 |
| hCV11503414 | rs2066865 | hCV1190562 | rs1490684 | 0.51 | 0.048174697 | 0.0947 |
| hCV11503414 | rs2066865 | hCV1190563 | rs4696565 | 0.51 | 0.048174697 | 0.114 |
| hCV11503414 | rs2066865 | hCV1190567 | rs4696210 | 0.51 | 0.048174697 | 0.114 |
| hCV11503414 | rs2066865 | hCV1190572 | rs1032335 | 0.51 | 0.048174697 | 0.163 |
| hCV11503414 | rs2066865 | hCV1190580 | rs9998926 | 0.51 | 0.048174697 | 0.0874 |
| hCV11503414 | rs2066865 | hCV1190581 | rs6856249 | 0.51 | 0.048174697 | 0.114 |
| hCV11503414 | rs2066865 | hCV1190582 | rs10013533 | 0.51 | 0.048174697 | 0.114 |
| hCV11503414 | rs2066865 | hCV15860433 | rs2070006 | 0.51 | 0.048174697 | 0.4534 |
| hCV11503414 | rs2066865 | hCV176753 | rs2404478 | 0.51 | 0.048174697 | 0.0542 |
| hCV11503414 | rs2066865 | hCV21680 | rs7666020 | 0.51 | 0.048174697 | 0.153 |
| hCV11503414 | rs2066865 | hCV21681 | rs6536018 | 0.51 | 0.048174697 | 0.3185 |
| hCV11503414 | rs2066865 | hCV22273499 | rs7668014 | 0.51 | 0.048174697 | 0.0903 |
| hCV11503414 | rs2066865 | hCV22274180 | rs11935584 | 0.51 | 0.048174697 | 0.1032 |
| hCV11503414 | rs2066865 | hCV229029 | rs13103792 | 0.51 | 0.048174697 | 0.0486 |
| hCV11503414 | rs2066865 | hCV2407252 | rs149225 | 0.51 | 0.048174697 | 0.1 |
| hCV11503414 | rs2066865 | hCV2407354 | rs276166 | 0.51 | 0.048174697 | 0.0534 |
| hCV11503414 | rs2066865 | hCV24834 | rs4235247 | 0.51 | 0.048174697 | 0.4263 |
| hCV11503414 | rs2066865 | hCV25610762 | rs7668818 | 0.51 | 0.048174697 | 0.0707 |
| hCV11503414 | rs2066865 | hCV26019871 | rs4547780 | 0.51 | 0.048174697 | 0.3146 |
| hCV11503414 | rs2066865 | hCV26024202 | rs11731813 | 0.51 | 0.048174697 | 0.2237 |
| hCV11503414 | rs2066865 | hCV26024285 | rs11726919 | 0.51 | 0.048174697 | 0.1063 |
| hCV11503414 | rs2066865 | hCV26024286 | rs11726850 | 0.51 | 0.048174697 | 0.1063 |
| hCV11503414 | rs2066865 | hCV26024287 | rs7666541 | 0.51 | 0.048174697 | 0.1357 |
| hCV11503414 | rs2066865 | hCV26024294 | rs11731663 | 0.51 | 0.048174697 | 0.1063 |
| hCV11503414 | rs2066865 | hCV265748 | rs12500118 | 0.51 | 0.048174697 | 0.1669 |
| hCV11503414 | rs2066865 | hCV27020269 | rs7659613 | 0.51 | 0.048174697 | 0.5249 |
| hCV11503414 | rs2066865 | hCV27020277 | rs6825454 | 0.51 | 0.048174697 | 0.8713 |
| hCV11503414 | rs2066865 | hCV27020280 | rs4463047 | 0.51 | 0.048174697 | 0.2252 |
| hCV11503414 | rs2066865 | hCV27020304 | rs13101534 | 0.51 | 0.048174697 | 0.1091 |
| hCV11503414 | rs2066865 | hCV27313130 | rs4634202 | 0.51 | 0.048174697 | 0.103 |
| hCV11503414 | rs2066865 | hCV27479909 | rs3775785 | 0.51 | 0.048174697 | 0.1072 |
| hCV11503414 | rs2066865 | hCV27905214 | rs4323084 | 0.51 | 0.048174697 | 0.2956 |
| hCV11503414 | rs2066865 | hCV27907560 | rs4696576 | 0.51 | 0.048174697 | 0.135 |
| hCV11503414 | rs2066865 | hCV27937396 | rs4634201 | 0.51 | 0.048174697 | 0.4298 |
| hCV11503414 | rs2066865 | hCV286004 | rs1118824 | 0.51 | 0.048174697 | 0.1213 |
| hCV11503414 | rs2066865 | hCV2891425 | rs1948714 | 0.51 | 0.048174697 | 0.1065 |
| hCV11503414 | rs2066865 | hCV2891532 | rs13110294 | 0.51 | 0.048174697 | 0.1006 |
| hCV11503414 | rs2066865 | hCV2892850 | rs10050268 | 0.51 | 0.048174697 | 0.0552 |
| hCV11503414 | rs2066865 | hCV2892855 | rs6536024 | 0.51 | 0.048174697 | 0.2222 |
| hCV11503414 | rs2066865 | hCV2892858 | rs12648395 | 0.51 | 0.048174697 | 0.1213 |
| hCV11503414 | rs2066865 | hCV2892859 | rs13130318 | 0.51 | 0.048174697 | 0.859 |
| hCV11503414 | rs2066865 | hCV2892863 | rs1049636 | 0.51 | 0.048174697 | 0.1213 |
| hCV11503414 | rs2066865 | hCV2892869 | rs13109457 | 0.51 | 0.048174697 | 0.955 |
| hCV11503414 | rs2066865 | hCV2892870 | rs2070011 | 0.51 | 0.048174697 | 0.439 |
| hCV11503414 | rs2066865 | hCV2892876 | rs2070018 | 0.51 | 0.048174697 | 0.0566 |
| hCV11503414 | rs2066865 | hCV2892877 | rs6050 | 0.51 | 0.048174697 | 0.873 |
| hCV11503414 | rs2066865 | hCV2892893 | rs12648258 | 0.51 | 0.048174697 | 0.4009 |
| hCV11503414 | rs2066865 | hCV2892895 | rs12641958 | 0.51 | 0.048174697 | 0.0903 |
| hCV11503414 | rs2066865 | hCV2892896 | rs11940724 | 0.51 | 0.048174697 | 0.0903 |
| hCV11503414 | rs2066865 | hCV2892899 | rs7680155 | 0.51 | 0.048174697 | 0.1032 |
| hCV11503414 | rs2066865 | hCV2892905 | rs12642770 | 0.51 | 0.048174697 | 0.3619 |
| hCV11503414 | rs2066865 | hCV2892918 | rs12511469 | 0.51 | 0.048174697 | 0.3888 |
| hCV11503414 | rs2066865 | hCV2892923 | rs13435192 | 0.51 | 0.048174697 | 0.1113 |
| hCV11503414 | rs2066865 | hCV2892924 | rs13435101 | 0.51 | 0.048174697 | 0.1105 |
| hCV11503414 | rs2066865 | hCV2892925 | rs7689945 | 0.51 | 0.048174697 | 0.1063 |
| hCV11503414 | rs2066865 | hCV2892926 | rs7662567 | 0.51 | 0.048174697 | 0.3986 |
| hCV11503414 | rs2066865 | hCV2892927 | rs13123551 | 0.51 | 0.048174697 | 0.1327 |
| hCV11503414 | rs2066865 | hCV2892928 | rs13147579 | 0.51 | 0.048174697 | 0.4128 |
| hCV11503414 | rs2066865 | hCV28953838 | rs7690851 | 0.51 | 0.048174697 | 0.3221 |
| hCV11503414 | rs2066865 | hCV28953840 | rs6536017 | 0.51 | 0.048174697 | 0.1155 |
| hCV11503414 | rs2066865 | hCV28954780 | rs7656522 | 0.51 | 0.048174697 | 0.0537 |
| hCV11503414 | rs2066865 | hCV28966638 | rs7676857 | 0.51 | 0.048174697 | 0.1625 |
| hCV11503414 | rs2066865 | hCV29317506 | rs7686002 | 0.51 | 0.048174697 | 0.0551 |
| hCV11503414 | rs2066865 | hCV29420822 | rs4642230 | 0.51 | 0.048174697 | 0.4837 |
| hCV11503414 | rs2066865 | hCV29420827 | rs7654425 | 0.51 | 0.048174697 | 0.0903 |
| hCV11503414 | rs2066865 | hCV29420828 | rs7660120 | 0.51 | 0.048174697 | 0.0796 |
| hCV11503414 | rs2066865 | hCV29570696 | rs9997519 | 0.51 | 0.048174697 | 0.0523 |
| hCV11503414 | rs2066865 | hCV29582612 | rs4550901 | 0.51 | 0.048174697 | 0.0566 |
| hCV11503414 | rs2066865 | hCV29751345 | rs6811271 | 0.51 | 0.048174697 | 0.108 |
| hCV11503414 | rs2066865 | hCV29983641 | rs10008078 | 0.51 | 0.048174697 | 0.461 |
| hCV11503414 | rs2066865 | hCV30004073 | rs6832957 | 0.51 | 0.048174697 | 0.049 |
| hCV11503414 | rs2066865 | hCV30562176 | rs9284660 | 0.51 | 0.048174697 | 0.1006 |
| hCV11503414 | rs2066865 | hCV30679139 | rs13139082 | 0.51 | 0.048174697 | 0.0593 |
| hCV11503414 | rs2066865 | hCV30679140 | rs13112066 | 0.51 | 0.048174697 | 0.0499 |
| hCV11503414 | rs2066865 | hCV30679141 | rs13111621 | 0.51 | 0.048174697 | 0.0629 |
| hCV11503414 | rs2066865 | hCV30679164 | rs12649437 | 0.51 | 0.048174697 | 0.1051 |
| hCV11503414 | rs2066865 | hCV30679170 | rs13148992 | 0.51 | 0.048174697 | 0.2324 |
| hCV11503414 | rs2066865 | hCV30679242 | rs4235243 | 0.51 | 0.048174697 | 0.1248 |
| hCV11503414 | rs2066865 | hCV30679244 | rs4575978 | 0.51 | 0.048174697 | 0.1063 |
| hCV11503414 | rs2066865 | hCV30679245 | rs4386583 | 0.51 | 0.048174697 | 0.1063 |
| hCV11503414 | rs2066865 | hCV30711231 | rs12642469 | 0.51 | 0.048174697 | 0.461 |
| hCV11503414 | rs2066865 | hCV31863942 | rs13101382 | 0.51 | 0.048174697 | 0.1052 |
| hCV11503414 | rs2066865 | hCV31863979 | rs12186294 | 0.51 | 0.048174697 | 0.2778 |
| hCV11503414 | rs2066865 | hCV31863982 | rs7659024 | 0.51 | 0.048174697 | 1 |
| hCV11503414 | rs2066865 | hCV31863989 | rs4308349 | 0.51 | 0.048174697 | 0.0513 |
| hCV11503414 | rs2066865 | hCV31863993 | rs7673587 | 0.51 | 0.048174697 | 0.1032 |
| hCV11503414 | rs2066865 | hCV32212659 | rs4622984 | 0.51 | 0.048174697 | 0.1879 |
| hCV11503414 | rs2066865 | hCV32212662 | rs11099958 | 0.51 | 0.048174697 | 0.0527 |
| hCV11503414 | rs2066865 | hCV32212663 | rs7670827 | 0.51 | 0.048174697 | 0.0974 |
| hCV11503414 | rs2066865 | hCV32212664 | rs12642646 | 0.51 | 0.048174697 | 0.0491 |
| hCV11503414 | rs2066865 | hCV32212669 | rs12649647 | 0.51 | 0.048174697 | 0.0577 |
| hCV11503414 | rs2066865 | hCV354895 | rs11737226 | 0.51 | 0.048174697 | 0.2322 |
| hCV11503414 | rs2066865 | hCV354896 | rs7690972 | 0.51 | 0.048174697 | 0.2322 |
| hCV11503414 | rs2066865 | hCV36809 | rs10517590 | 0.51 | 0.048174697 | 0.133 |
| hCV11503414 | rs2066865 | hCV400532 | rs11099956 | 0.51 | 0.048174697 | 0.1095 |
| hCV11503414 | rs2066865 | hCV426162 | rs10857275 | 0.51 | 0.048174697 | 0.1132 |
| hCV11503414 | rs2066865 | hCV426165 | rs990185 | 0.51 | 0.048174697 | 0.1074 |
| hCV11503414 | rs2066865 | hCV426167 | rs1388087 | 0.51 | 0.048174697 | 0.0905 |
| hCV11503414 | rs2066865 | hCV426168 | rs1388088 | 0.51 | 0.048174697 | 0.114 |
| hCV11503414 | rs2066865 | hCV426169 | rs1388066 | 0.51 | 0.048174697 | 0.1336 |
| hCV11503414 | rs2066865 | hCV426170 | rs1388067 | 0.51 | 0.048174697 | 0.114 |
| hCV11503414 | rs2066865 | hCV426172 | rs7670027 | 0.51 | 0.048174697 | 0.1443 |
| hCV11503414 | rs2066865 | hCV426173 | rs12504201 | 0.51 | 0.048174697 | 0.2207 |
| hCV11503414 | rs2066865 | hCV426175 | rs9884952 | 0.51 | 0.048174697 | 0.163 |
| hCV11503414 | rs2066865 | hCV426176 | rs9884775 | 0.51 | 0.048174697 | 0.163 |
| hCV11503414 | rs2066865 | hCV426178 | rs9884570 | 0.51 | 0.048174697 | 0.1519 |
| hCV11503414 | rs2066865 | hCV426181 | rs11099955 | 0.51 | 0.048174697 | 0.163 |
| hCV11503414 | rs2066865 | hCV426182 | rs10014536 | 0.51 | 0.048174697 | 0.1769 |
| hCV11503414 | rs2066865 | hCV426183 | rs10014635 | 0.51 | 0.048174697 | 0.1772 |
| hCV11503414 | rs2066865 | hCV426184 | rs1032336 | 0.51 | 0.048174697 | 0.163 |
| hCV11503414 | rs2066865 | hCV437164 | rs7685964 | 0.51 | 0.048174697 | 0.1071 |
| hCV11503414 | rs2066865 | hCV470979 | rs1490672 | 0.51 | 0.048174697 | 0.2211 |
| hCV11503414 | rs2066865 | hCV501682 | rs4403033 | 0.51 | 0.048174697 | 0.1063 |
| hCV11503414 | rs2066865 | hCV501683 | rs4312742 | 0.51 | 0.048174697 | 0.1248 |
| hCV11503414 | rs2066865 | hCV501686 | rs4327464 | 0.51 | 0.048174697 | 0.1026 |
| hCV11503414 | rs2066865 | hCV7429674 | rs871540 | 0.51 | 0.048174697 | 0.0542 |
| hCV11503414 | rs2066865 | hCV7429780 | rs1800792 | 0.51 | 0.048174697 | 0.2745 |
| hCV11503414 | rs2066865 | hCV7429782 | rs1118823 | 0.51 | 0.048174697 | 0.1185 |
| hCV11503414 | rs2066865 | hCV7429783 | rs1044291 | 0.51 | 0.048174697 | 0.0903 |
| hCV11503414 | rs2066865 | hCV7429793 | rs1025154 | 0.51 | 0.048174697 | 0.461 |
| hCV11503414 | rs2066865 | hCV7430148 | rs1490685 | 0.51 | 0.048174697 | 0.163 |
| hCV11503414 | rs2066865 | hCV7430149 | rs1490649 | 0.51 | 0.048174697 | 0.1131 |
| hCV11503414 | rs2066865 | hCV7430150 | rs1490648 | 0.51 | 0.048174697 | 0.1182 |
| hCV11503414 | rs2066865 | hCV7430152 | rs1490656 | 0.51 | 0.048174697 | 0.1029 |
| hCV11503414 | rs2066865 | hCV7430153 | rs1388077 | 0.51 | 0.048174697 | 0.114 |
| hCV11503414 | rs2066865 | hCV7430158 | rs1466662 | 0.51 | 0.048174697 | 0.1669 |
| hCV11503414 | rs2066865 | hCV8938834 | rs1500372 | 0.51 | 0.048174697 | 0.076 |
| hCV11503414 | rs2066865 | hCV8938838 | rs1392546 | 0.51 | 0.048174697 | 0.076 |
| hCV11503414 | rs2066865 | hCV9317142 | rs12186175 | 0.51 | 0.048174697 | 0.1052 |
| hCV11503414 | rs2066865 | hCV99436 | rs10015747 | 0.51 | 0.048174697 | 0.1308 |
| hCV11503414 | rs2066865 | hDV70934991 | rs17301943 | 0.51 | 0.048174697 | 0.0542 |
| hCV11503414 | rs2066865 | hDV70945235 | rs17373860 | 0.51 | 0.048174697 | 0.16 |
| hCV11503414 | rs2066865 | hDV77232287 | rs7666918 | 0.51 | 0.048174697 | 0.0903 |
| hCV11503414 | rs2066865 | hDV96226316 | rs6834312 | 0.51 | 0.048174697 | 0.1334 |
| hCV11503469 | rs2066854 | hCV11281035 | rs4583739 | 0.51 | 0.048166678 | 0.094 |
| hCV11503469 | rs2066854 | hCV11503378 | rs1490655 | 0.51 | 0.048166678 | 0.068 |
| hCV11503469 | rs2066854 | hCV11503379 | rs1490654 | 0.51 | 0.048166678 | 0.0512 |
| hCV11503469 | rs2066854 | hCV11503382 | rs1873369 | 0.51 | 0.048166678 | 0.1718 |
| hCV11503469 | rs2066854 | hCV11503414 | rs2066865 | 0.51 | 0.048166678 | 0.9559 |
| hCV11503469 | rs2066854 | hCV11503416 | rs2066864 | 0.51 | 0.048166678 | 0.9579 |
| hCV11503469 | rs2066854 | hCV11503431 | rs2066861 | 0.51 | 0.048166678 | 0.9559 |
| hCV11503469 | rs2066854 | hCV11503470 | rs1800788 | 0.51 | 0.048166678 | 0.3765 |
| hCV11503469 | rs2066854 | hCV11853342 | rs7660343 | 0.51 | 0.048166678 | 0.0674 |
| hCV11503469 | rs2066854 | hCV11853353 | rs9995943 | 0.51 | 0.048166678 | 0.0981 |
| hCV11503469 | rs2066854 | hCV11853354 | rs10030235 | 0.51 | 0.048166678 | 0.0868 |
| hCV11503469 | rs2066854 | hCV11853357 | rs10033383 | 0.51 | 0.048166678 | 0.0595 |
| hCV11503469 | rs2066854 | hCV11853362 | rs4696572 | 0.51 | 0.048166678 | 0.1483 |
| hCV11503469 | rs2066854 | hCV11853363 | rs4696573 | 0.51 | 0.048166678 | 0.0981 |
| hCV11503469 | rs2066854 | hCV11853373 | rs1907155 | 0.51 | 0.048166678 | 0.1398 |
| hCV11503469 | rs2066854 | hCV11853378 | rs1907154 | 0.51 | 0.048166678 | 0.0869 |
| hCV11503469 | rs2066854 | hCV11853384 | rs12646456 | 0.51 | 0.048166678 | 0.0869 |
| hCV11503469 | rs2066854 | hCV11853387 | rs1490683 | 0.51 | 0.048166678 | 0.1451 |
| hCV11503469 | rs2066854 | hCV11853416 | rs4346631 | 0.51 | 0.048166678 | 0.05 |
| hCV11503469 | rs2066854 | hCV11853418 | rs12501998 | 0.51 | 0.048166678 | 0.0786 |
| hCV11503469 | rs2066854 | hCV11853419 | rs13151559 | 0.51 | 0.048166678 | 0.0786 |
| hCV11503469 | rs2066854 | hCV11853423 | rs3857093 | 0.51 | 0.048166678 | 0.0786 |
| hCV11503469 | rs2066854 | hCV11853424 | rs871541 | 0.51 | 0.048166678 | 0.0786 |
| hCV11503469 | rs2066854 | hCV11853483 | rs12644950 | 0.51 | 0.048166678 | 0.9545 |
| hCV11503469 | rs2066854 | hCV11853489 | rs7681423 | 0.51 | 0.048166678 | 0.9579 |
| hCV11503469 | rs2066854 | hCV11853496 | rs7654093 | 0.51 | 0.048166678 | 0.9559 |
| hCV11503469 | rs2066854 | hCV11853631 | rs12651106 | 0.51 | 0.048166678 | 0.1768 |
| hCV11503469 | rs2066854 | hCV1190562 | rs1490684 | 0.51 | 0.048166678 | 0.1398 |
| hCV11503469 | rs2066854 | hCV1190563 | rs4696565 | 0.51 | 0.048166678 | 0.063 |
| hCV11503469 | rs2066854 | hCV1190567 | rs4696210 | 0.51 | 0.048166678 | 0.063 |
| hCV11503469 | rs2066854 | hCV1190572 | rs1032335 | 0.51 | 0.048166678 | 0.0869 |
| hCV11503469 | rs2066854 | hCV1190580 | rs9998926 | 0.51 | 0.048166678 | 0.0915 |
| hCV11503469 | rs2066854 | hCV1190581 | rs6856249 | 0.51 | 0.048166678 | 0.063 |
| hCV11503469 | rs2066854 | hCV1190582 | rs10013533 | 0.51 | 0.048166678 | 0.063 |
| hCV11503469 | rs2066854 | hCV15860433 | rs2070006 | 0.51 | 0.048166678 | 0.5293 |
| hCV11503469 | rs2066854 | hCV15971616 | rs2227421 | 0.51 | 0.048166678 | 0.1143 |
| hCV11503469 | rs2066854 | hCV176753 | rs2404478 | 0.51 | 0.048166678 | 0.0786 |
| hCV11503469 | rs2066854 | hCV21680 | rs7666020 | 0.51 | 0.048166678 | 0.1247 |
| hCV11503469 | rs2066854 | hCV21681 | rs6536018 | 0.51 | 0.048166678 | 0.2928 |
| hCV11503469 | rs2066854 | hCV22273499 | rs7668014 | 0.51 | 0.048166678 | 0.1071 |
| hCV11503469 | rs2066854 | hCV22274180 | rs11935584 | 0.51 | 0.048166678 | 0.1125 |
| hCV11503469 | rs2066854 | hCV229029 | rs13103792 | 0.51 | 0.048166678 | 0.062 |
| hCV11503469 | rs2066854 | hCV2407223 | rs156502 | 0.51 | 0.048166678 | 0.0621 |
| hCV11503469 | rs2066854 | hCV2407232 | rs156550 | 0.51 | 0.048166678 | 0.0563 |
| hCV11503469 | rs2066854 | hCV2407238 | rs156543 | 0.51 | 0.048166678 | 0.0615 |
| hCV11503469 | rs2066854 | hCV2407252 | rs149225 | 0.51 | 0.048166678 | 0.105 |
| hCV11503469 | rs2066854 | hCV24834 | rs4235247 | 0.51 | 0.048166678 | 0.4128 |
| hCV11503469 | rs2066854 | hCV25610762 | rs7668818 | 0.51 | 0.048166678 | 0.0634 |
| hCV11503469 | rs2066854 | hCV26019871 | rs4547780 | 0.51 | 0.048166678 | 0.3094 |
| hCV11503469 | rs2066854 | hCV26024202 | rs11731813 | 0.51 | 0.048166678 | 0.225 |
| hCV11503469 | rs2066854 | hCV26024287 | rs7666541 | 0.51 | 0.048166678 | 0.1353 |
| hCV11503469 | rs2066854 | hCV26024295 | rs12643125 | 0.51 | 0.048166678 | 0.1125 |
| hCV11503469 | rs2066854 | hCV265748 | rs12500118 | 0.51 | 0.048166678 | 0.1103 |
| hCV11503469 | rs2066854 | hCV27020184 | rs47379 | 0.51 | 0.048166678 | 0.0776 |
| hCV11503469 | rs2066854 | hCV27020269 | rs7659613 | 0.51 | 0.048166678 | 0.5455 |
| hCV11503469 | rs2066854 | hCV27020277 | rs6825454 | 0.51 | 0.048166678 | 0.8694 |
| hCV11503469 | rs2066854 | hCV27020280 | rs4463047 | 0.51 | 0.048166678 | 0.2409 |
| hCV11503469 | rs2066854 | hCV27020284 | rs1846707 | 0.51 | 0.048166678 | 0.1139 |
| hCV11503469 | rs2066854 | hCV27313130 | rs4634202 | 0.51 | 0.048166678 | 0.1555 |
| hCV11503469 | rs2066854 | hCV27479909 | rs3775785 | 0.51 | 0.048166678 | 0.0578 |
| hCV11503469 | rs2066854 | hCV27905214 | rs4323084 | 0.51 | 0.048166678 | 0.325 |
| hCV11503469 | rs2066854 | hCV27907560 | rs4696576 | 0.51 | 0.048166678 | 0.0999 |
| hCV11503469 | rs2066854 | hCV27937396 | rs4634201 | 0.51 | 0.048166678 | 0.4472 |
| hCV11503469 | rs2066854 | hCV286004 | rs1118824 | 0.51 | 0.048166678 | 0.1531 |
| hCV11503469 | rs2066854 | hCV2891496 | rs156584 | 0.51 | 0.048166678 | 0.0621 |
| hCV11503469 | rs2066854 | hCV2891515 | rs11940892 | 0.51 | 0.048166678 | 0.0615 |
| hCV11503469 | rs2066854 | hCV2891530 | rs7662464 | 0.51 | 0.048166678 | 0.0615 |
| hCV11503469 | rs2066854 | hCV2891532 | rs13110294 | 0.51 | 0.048166678 | 0.0626 |
| hCV11503469 | rs2066854 | hCV2891552 | rs1876031 | 0.51 | 0.048166678 | 0.1011 |
| hCV11503469 | rs2066854 | hCV2891554 | rs12501328 | 0.51 | 0.048166678 | 0.059 |
| hCV11503469 | rs2066854 | hCV2892850 | rs10050268 | 0.51 | 0.048166678 | 0.0638 |
| hCV11503469 | rs2066854 | hCV2892855 | rs6536024 | 0.51 | 0.048166678 | 0.2667 |
| hCV11503469 | rs2066854 | hCV2892858 | rs12648395 | 0.51 | 0.048166678 | 0.1531 |
| hCV11503469 | rs2066854 | hCV2892859 | rs13130318 | 0.51 | 0.048166678 | 0.8253 |
| hCV11503469 | rs2066854 | hCV2892863 | rs1049636 | 0.51 | 0.048166678 | 0.1531 |
| hCV11503469 | rs2066854 | hCV2892869 | rs13109457 | 0.51 | 0.048166678 | 0.9149 |
| hCV11503469 | rs2066854 | hCV2892870 | rs2070011 | 0.51 | 0.048166678 | 0.5068 |
| hCV11503469 | rs2066854 | hCV2892877 | rs6050 | 0.51 | 0.048166678 | 0.8287 |
| hCV11503469 | rs2066854 | hCV2892878 | rs2070022 | 0.51 | 0.048166678 | 0.0592 |
| hCV11503469 | rs2066854 | hCV2892889 | rs2227412 | 0.51 | 0.048166678 | 0.0547 |
| hCV11503469 | rs2066854 | hCV2892893 | rs12648258 | 0.51 | 0.048166678 | 0.4044 |
| hCV11503469 | rs2066854 | hCV2892895 | rs12641958 | 0.51 | 0.048166678 | 0.1071 |
| hCV11503469 | rs2066854 | hCV2892896 | rs11940724 | 0.51 | 0.048166678 | 0.1071 |
| hCV11503469 | rs2066854 | hCV2892899 | rs7680155 | 0.51 | 0.048166678 | 0.1125 |
| hCV11503469 | rs2066854 | hCV2892905 | rs12642770 | 0.51 | 0.048166678 | 0.3381 |
| hCV11503469 | rs2066854 | hCV2892918 | rs12511469 | 0.51 | 0.048166678 | 0.3613 |
| hCV11503469 | rs2066854 | hCV2892923 | rs13435192 | 0.51 | 0.048166678 | 0.1375 |
| hCV11503469 | rs2066854 | hCV2892924 | rs13435101 | 0.51 | 0.048166678 | 0.1375 |
| hCV11503469 | rs2066854 | hCV2892925 | rs7689945 | 0.51 | 0.048166678 | 0.1375 |
| hCV11503469 | rs2066854 | hCV2892926 | rs7662567 | 0.51 | 0.048166678 | 0.3671 |
| hCV11503469 | rs2066854 | hCV2892927 | rs13123551 | 0.51 | 0.048166678 | 0.1434 |
| hCV11503469 | rs2066854 | hCV2892928 | rs13147579 | 0.51 | 0.048166678 | 0.3836 |
| hCV11503469 | rs2066854 | hCV28953838 | rs7690851 | 0.51 | 0.048166678 | 0.3242 |
| hCV11503469 | rs2066854 | hCV28953840 | rs6536017 | 0.51 | 0.048166678 | 0.1025 |
| hCV11503469 | rs2066854 | hCV28954780 | rs7656522 | 0.51 | 0.048166678 | 0.0782 |
| hCV11503469 | rs2066854 | hCV28954790 | rs7662783 | 0.51 | 0.048166678 | 0.0496 |
| hCV11503469 | rs2066854 | hCV28954801 | rs4447837 | 0.51 | 0.048166678 | 0.062 |
| hCV11503469 | rs2066854 | hCV28966638 | rs7676857 | 0.51 | 0.048166678 | 0.1179 |
| hCV11503469 | rs2066854 | hCV29420822 | rs4642230 | 0.51 | 0.048166678 | 0.4022 |
| hCV11503469 | rs2066854 | hCV29420827 | rs7654425 | 0.51 | 0.048166678 | 0.1071 |
| hCV11503469 | rs2066854 | hCV29420828 | rs7660120 | 0.51 | 0.048166678 | 0.0906 |
| hCV11503469 | rs2066854 | hCV29570696 | rs9997519 | 0.51 | 0.048166678 | 0.0519 |
| hCV11503469 | rs2066854 | hCV29636755 | rs10517602 | 0.51 | 0.048166678 | 0.0706 |
| hCV11503469 | rs2066854 | hCV29751345 | rs6811271 | 0.51 | 0.048166678 | 0.1681 |
| hCV11503469 | rs2066854 | hCV29983641 | rs10008078 | 0.51 | 0.048166678 | 0.3893 |
| hCV11503469 | rs2066854 | hCV30562176 | rs9284660 | 0.51 | 0.048166678 | 0.0785 |
| hCV11503469 | rs2066854 | hCV30679139 | rs13139082 | 0.51 | 0.048166678 | 0.0616 |
| hCV11503469 | rs2066854 | hCV30679140 | rs13112066 | 0.51 | 0.048166678 | 0.0674 |
| hCV11503469 | rs2066854 | hCV30679164 | rs12649437 | 0.51 | 0.048166678 | 0.0849 |
| hCV11503469 | rs2066854 | hCV30679170 | rs13148992 | 0.51 | 0.048166678 | 0.2399 |
| hCV11503469 | rs2066854 | hCV30711231 | rs12642469 | 0.51 | 0.048166678 | 0.3893 |
| hCV11503469 | rs2066854 | hCV31863937 | rs12507608 | 0.51 | 0.048166678 | 0.0706 |
| hCV11503469 | rs2066854 | hCV31863979 | rs12186294 | 0.51 | 0.048166678 | 0.3086 |
| hCV11503469 | rs2066854 | hCV31863982 | rs7659024 | 0.51 | 0.048166678 | 0.9559 |
| hCV11503469 | rs2066854 | hCV31863993 | rs7673587 | 0.51 | 0.048166678 | 0.1125 |
| hCV11503469 | rs2066854 | hCV32212658 | rs11099959 | 0.51 | 0.048166678 | 0.0536 |
| hCV11503469 | rs2066854 | hCV32212659 | rs4622984 | 0.51 | 0.048166678 | 0.195 |
| hCV11503469 | rs2066854 | hCV32212663 | rs7670827 | 0.51 | 0.048166678 | 0.1002 |
| hCV11503469 | rs2066854 | hCV32212664 | rs12642646 | 0.51 | 0.048166678 | 0.0849 |
| hCV11503469 | rs2066854 | hCV32287640 | rs4367156 | 0.51 | 0.048166678 | 0.062 |
| hCV11503469 | rs2066854 | hCV354895 | rs11737226 | 0.51 | 0.048166678 | 0.2251 |
| hCV11503469 | rs2066854 | hCV354896 | rs7690972 | 0.51 | 0.048166678 | 0.2251 |
| hCV11503469 | rs2066854 | hCV37878 | rs4235241 | 0.51 | 0.048166678 | 0.1157 |
| hCV11503469 | rs2066854 | hCV400532 | rs11099956 | 0.51 | 0.048166678 | 0.0951 |
| hCV11503469 | rs2066854 | hCV426167 | rs1388087 | 0.51 | 0.048166678 | 0.0981 |
| hCV11503469 | rs2066854 | hCV426168 | rs1388088 | 0.51 | 0.048166678 | 0.063 |
| hCV11503469 | rs2066854 | hCV426169 | rs1388066 | 0.51 | 0.048166678 | 0.0794 |
| hCV11503469 | rs2066854 | hCV426170 | rs1388067 | 0.51 | 0.048166678 | 0.063 |
| hCV11503469 | rs2066854 | hCV426172 | rs7670027 | 0.51 | 0.048166678 | 0.083 |
| hCV11503469 | rs2066854 | hCV426173 | rs12504201 | 0.51 | 0.048166678 | 0.1597 |
| hCV11503469 | rs2066854 | hCV426175 | rs9884952 | 0.51 | 0.048166678 | 0.0816 |
| hCV11503469 | rs2066854 | hCV426176 | rs9884775 | 0.51 | 0.048166678 | 0.0869 |
| hCV11503469 | rs2066854 | hCV426178 | rs9884570 | 0.51 | 0.048166678 | 0.078 |
| hCV11503469 | rs2066854 | hCV426181 | rs11099955 | 0.51 | 0.048166678 | 0.0869 |
| hCV11503469 | rs2066854 | hCV426182 | rs10014536 | 0.51 | 0.048166678 | 0.1101 |
| hCV11503469 | rs2066854 | hCV426183 | rs10014635 | 0.51 | 0.048166678 | 0.0914 |
| hCV11503469 | rs2066854 | hCV426184 | rs1032336 | 0.51 | 0.048166678 | 0.0869 |
| hCV11503469 | rs2066854 | hCV437164 | rs7685964 | 0.51 | 0.048166678 | 0.0537 |
| hCV11503469 | rs2066854 | hCV470979 | rs1490672 | 0.51 | 0.048166678 | 0.2217 |
| hCV11503469 | rs2066854 | hCV489970 | rs11734901 | 0.51 | 0.048166678 | 0.1235 |
| hCV11503469 | rs2066854 | hCV501681 | rs4076040 | 0.51 | 0.048166678 | 0.1157 |
| hCV11503469 | rs2066854 | hCV7429674 | rs871540 | 0.51 | 0.048166678 | 0.0786 |
| hCV11503469 | rs2066854 | hCV7429780 | rs1800792 | 0.51 | 0.048166678 | 0.3086 |
| hCV11503469 | rs2066854 | hCV7429782 | rs1118823 | 0.51 | 0.048166678 | 0.1531 |
| hCV11503469 | rs2066854 | hCV7429783 | rs1044291 | 0.51 | 0.048166678 | 0.1141 |
| hCV11503469 | rs2066854 | hCV7429793 | rs1025154 | 0.51 | 0.048166678 | 0.3893 |
| hCV11503469 | rs2066854 | hCV7430148 | rs1490685 | 0.51 | 0.048166678 | 0.0869 |
| hCV11503469 | rs2066854 | hCV7430149 | rs1490649 | 0.51 | 0.048166678 | 0.0623 |
| hCV11503469 | rs2066854 | hCV7430150 | rs1490648 | 0.51 | 0.048166678 | 0.0661 |
| hCV11503469 | rs2066854 | hCV7430152 | rs1490656 | 0.51 | 0.048166678 | 0.0539 |
| hCV11503469 | rs2066854 | hCV7430153 | rs1388077 | 0.51 | 0.048166678 | 0.063 |
| hCV11503469 | rs2066854 | hCV7430158 | rs1466662 | 0.51 | 0.048166678 | 0.1103 |
| hCV11503469 | rs2066854 | hDV70817639 | rs17031739 | 0.51 | 0.048166678 | 0.0603 |
| hCV11503469 | rs2066854 | hDV70817640 | rs17031740 | 0.51 | 0.048166678 | 0.062 |
| hCV11503469 | rs2066854 | hDV70817803 | rs17031951 | 0.51 | 0.048166678 | 0.0706 |
| hCV11503469 | rs2066854 | hDV70817805 | rs17031954 | 0.51 | 0.048166678 | 0.0706 |
| hCV11503469 | rs2066854 | hDV70817844 | rs17032000 | 0.51 | 0.048166678 | 0.0706 |
| hCV11503469 | rs2066854 | hDV70934991 | rs17301943 | 0.51 | 0.048166678 | 0.0786 |
| hCV11503469 | rs2066854 | hDV70945235 | rs17373860 | 0.51 | 0.048166678 | 0.129 |
| hCV11503469 | rs2066854 | hDV72277158 | rs28673871 | 0.51 | 0.048166678 | 0.0592 |
| hCV11503469 | rs2066854 | hDV77232287 | rs7666918 | 0.51 | 0.048166678 | 0.1071 |
| hCV11503469 | rs2066854 | hDV96226316 | rs6834312 | 0.51 | 0.048166678 | 0.0607 |
| hCV11503470 | rs1800788 | hCV11503382 | rs1873369 | 0.51 | 0.150481176 | 0.5598 |
| hCV11503470 | rs1800788 | hCV11503414 | rs2066865 | 0.51 | 0.150481176 | 0.4341 |
| hCV11503470 | rs1800788 | hCV11503416 | rs2066864 | 0.51 | 0.150481176 | 0.4007 |
| hCV11503470 | rs1800788 | hCV11503431 | rs2066861 | 0.51 | 0.150481176 | 0.4356 |
| hCV11503470 | rs1800788 | hCV11503469 | rs2066854 | 0.51 | 0.150481176 | 0.3765 |
| hCV11503470 | rs1800788 | hCV11853483 | rs12644950 | 0.51 | 0.150481176 | 0.3743 |
| hCV11503470 | rs1800788 | hCV11853489 | rs7681423 | 0.51 | 0.150481176 | 0.4007 |
| hCV11503470 | rs1800788 | hCV11853496 | rs7654093 | 0.51 | 0.150481176 | 0.4356 |
| hCV11503470 | rs1800788 | hCV15860433 | rs2070006 | 0.51 | 0.150481176 | 0.2862 |
| hCV11503470 | rs1800788 | hCV21680 | rs7666020 | 0.51 | 0.150481176 | 0.168 |
| hCV11503470 | rs1800788 | hCV21681 | rs6536018 | 0.51 | 0.150481176 | 0.2707 |
| hCV11503470 | rs1800788 | hCV24834 | rs4235247 | 0.51 | 0.150481176 | 0.6801 |
| hCV11503470 | rs1800788 | hCV26019871 | rs4547780 | 0.51 | 0.150481176 | 0.2046 |
| hCV11503470 | rs1800788 | hCV26024202 | rs11731813 | 0.51 | 0.150481176 | 0.4748 |
| hCV11503470 | rs1800788 | hCV27020269 | rs7659613 | 0.51 | 0.150481176 | 0.3134 |
| hCV11503470 | rs1800788 | hCV27020277 | rs6825454 | 0.51 | 0.150481176 | 0.4968 |
| hCV11503470 | rs1800788 | hCV27020280 | rs4463047 | 0.51 | 0.150481176 | 0.4485 |
| hCV11503470 | rs1800788 | hCV27313130 | rs4634202 | 0.51 | 0.150481176 | 0.3826 |
| hCV11503470 | rs1800788 | hCV27905214 | rs4323084 | 0.51 | 0.150481176 | 0.5288 |
| hCV11503470 | rs1800788 | hCV27907560 | rs4696576 | 0.51 | 0.150481176 | 0.2691 |
| hCV11503470 | rs1800788 | hCV27937396 | rs4634201 | 0.51 | 0.150481176 | 0.6797 |
| hCV11503470 | rs1800788 | hCV2892859 | rs13130318 | 0.51 | 0.150481176 | 0.2782 |
| hCV11503470 | rs1800788 | hCV2892869 | rs13109457 | 0.51 | 0.150481176 | 0.4255 |
| hCV11503470 | rs1800788 | hCV2892870 | rs2070011 | 0.51 | 0.150481176 | 0.3019 |
| hCV11503470 | rs1800788 | hCV2892877 | rs6050 | 0.51 | 0.150481176 | 0.5042 |
| hCV11503470 | rs1800788 | hCV2892893 | rs12648258 | 0.51 | 0.150481176 | 1 |
| hCV11503470 | rs1800788 | hCV2892905 | rs12642770 | 0.51 | 0.150481176 | 0.8219 |
| hCV11503470 | rs1800788 | hCV2892918 | rs12511469 | 0.51 | 0.150481176 | 1 |
| hCV11503470 | rs1800788 | hCV2892923 | rs13435192 | 0.51 | 0.150481176 | 0.2139 |
| hCV11503470 | rs1800788 | hCV2892924 | rs13435101 | 0.51 | 0.150481176 | 0.2119 |
| hCV11503470 | rs1800788 | hCV2892925 | rs7689945 | 0.51 | 0.150481176 | 0.2079 |
| hCV11503470 | rs1800788 | hCV2892926 | rs7662567 | 0.51 | 0.150481176 | 1 |
| hCV11503470 | rs1800788 | hCV2892927 | rs13123551 | 0.51 | 0.150481176 | 0.2674 |
| hCV11503470 | rs1800788 | hCV2892928 | rs13147579 | 0.51 | 0.150481176 | 1 |
| hCV11503470 | rs1800788 | hCV28953838 | rs7690851 | 0.51 | 0.150481176 | 0.211 |
| hCV11503470 | rs1800788 | hCV28953840 | rs6536017 | 0.51 | 0.150481176 | 0.1546 |
| hCV11503470 | rs1800788 | hCV29420822 | rs4642230 | 0.51 | 0.150481176 | 0.9 |
| hCV11503470 | rs1800788 | hCV29983641 | rs10008078 | 0.51 | 0.150481176 | 0.9719 |
| hCV11503470 | rs1800788 | hCV30679170 | rs13148992 | 0.51 | 0.150481176 | 0.4826 |
| hCV11503470 | rs1800788 | hCV30711231 | rs12642469 | 0.51 | 0.150481176 | 0.9719 |
| hCV11503470 | rs1800788 | hCV31863979 | rs12186294 | 0.51 | 0.150481176 | 0.1637 |
| hCV11503470 | rs1800788 | hCV31863982 | rs7659024 | 0.51 | 0.150481176 | 0.4356 |
| hCV11503470 | rs1800788 | hCV32212658 | rs11099959 | 0.51 | 0.150481176 | 0.163 |
| hCV11503470 | rs1800788 | hCV32212659 | rs4622984 | 0.51 | 0.150481176 | 0.4821 |
| hCV11503470 | rs1800788 | hCV32212664 | rs12642646 | 0.51 | 0.150481176 | 0.2273 |
| hCV11503470 | rs1800788 | hCV32212669 | rs12649647 | 0.51 | 0.150481176 | 0.1508 |
| hCV11503470 | rs1800788 | hCV354895 | rs11737226 | 0.51 | 0.150481176 | 0.5659 |
| hCV11503470 | rs1800788 | hCV354896 | rs7690972 | 0.51 | 0.150481176 | 0.5659 |
| hCV11503470 | rs1800788 | hCV470979 | rs1490672 | 0.51 | 0.150481176 | 0.4671 |
| hCV11503470 | rs1800788 | hCV7429793 | rs1025154 | 0.51 | 0.150481176 | 0.9719 |
| hCV11503470 | rs1800788 | hDV70945235 | rs17373860 | 0.51 | 0.150481176 | 0.2419 |
| hCV11541681 | rs2001490 | hCV112099 | rs12052539 | 0.51 | 0.847343426 | 0.9243 |
| hCV11541681 | rs2001490 | hCV112100 | rs17350125 | 0.51 | 0.847343426 | 0.9268 |
| hCV11541681 | rs2001490 | hCV11537012 | rs12992607 | 0.51 | 0.847343426 | 0.8544 |
| hCV11541681 | rs2001490 | hCV11537013 | rs12713793 | 0.51 | 0.847343426 | 0.849 |
| hCV11541681 | rs2001490 | hCV11541694 | rs12619258 | 0.51 | 0.847343426 | 1 |
| hCV11541681 | rs2001490 | hCV11541701 | rs6748233 | 0.51 | 0.847343426 | 0.9268 |
| hCV11541681 | rs2001490 | hCV11541702 | rs4852978 | 0.51 | 0.847343426 | 0.9268 |
| hCV11541681 | rs2001490 | hCV11541712 | rs12713791 | 0.51 | 0.847343426 | 0.8856 |
| hCV11541681 | rs2001490 | hCV11541719 | rs12615807 | 0.51 | 0.847343426 | 0.8544 |
| hCV11541681 | rs2001490 | hCV11541721 | rs2006997 | 0.51 | 0.847343426 | 0.8544 |
| hCV11541681 | rs2001490 | hCV11941453 | rs2001436 | 0.51 | 0.847343426 | 1 |
| hCV11541681 | rs2001490 | hCV133926 | rs12053242 | 0.51 | 0.847343426 | 0.9268 |
| hCV11541681 | rs2001490 | hCV133927 | rs7599453 | 0.51 | 0.847343426 | 0.9237 |
| hCV11541681 | rs2001490 | hCV133928 | rs4852977 | 0.51 | 0.847343426 | 0.9268 |
| hCV11541681 | rs2001490 | hCV133930 | rs1815028 | 0.51 | 0.847343426 | 0.9268 |
| hCV11541681 | rs2001490 | hCV15804221 | rs2421674 | 0.51 | 0.847343426 | 0.849 |
| hCV11541681 | rs2001490 | hCV15804228 | rs2421675 | 0.51 | 0.847343426 | 0.8544 |
| hCV11541681 | rs2001490 | hCV180709 | rs7591112 | 0.51 | 0.847343426 | 0.8898 |
| hCV11541681 | rs2001490 | hCV180710 | rs11891140 | 0.51 | 0.847343426 | 0.8898 |
| hCV11541681 | rs2001490 | hCV1835582 | rs12713789 | 0.51 | 0.847343426 | 0.8874 |
| hCV11541681 | rs2001490 | hCV1835584 | rs6749841 | 0.51 | 0.847343426 | 0.8856 |
| hCV11541681 | rs2001490 | hCV2050088 | rs2272178 | 0.51 | 0.847343426 | 0.8544 |
| hCV11541681 | rs2001490 | hCV2050091 | rs35791379 | 0.51 | 0.847343426 | 0.849 |
| hCV11541681 | rs2001490 | hCV2050092 | rs12624267 | 0.51 | 0.847343426 | 0.849 |
| hCV11541681 | rs2001490 | hCV2050096 | rs2116367 | 0.51 | 0.847343426 | 0.8544 |
| hCV11541681 | rs2001490 | hCV25924555 | rs13003035 | 0.51 | 0.847343426 | 0.8544 |
| hCV11541681 | rs2001490 | hCV26996655 | rs12713790 | 0.51 | 0.847343426 | 0.8889 |
| hCV11541681 | rs2001490 | hCV26996656 | rs1806683 | 0.51 | 0.847343426 | 0.9243 |
| hCV11541681 | rs2001490 | hCV26996674 | rs13006448 | 0.51 | 0.847343426 | 1 |
| hCV11541681 | rs2001490 | hCV26996679 | rs6732812 | 0.51 | 0.847343426 | 1 |
| hCV11541681 | rs2001490 | hCV26996688 | rs13015885 | 0.51 | 0.847343426 | 1 |
| hCV11541681 | rs2001490 | hCV26996689 | rs13014700 | 0.51 | 0.847343426 | 1 |
| hCV11541681 | rs2001490 | hCV26996690 | rs2421575 | 0.51 | 0.847343426 | 1 |
| hCV11541681 | rs2001490 | hCV26996697 | rs12611487 | 0.51 | 0.847343426 | 1 |
| hCV11541681 | rs2001490 | hCV26996701 | rs7608328 | 0.51 | 0.847343426 | 0.8545 |
| hCV11541681 | rs2001490 | hCV26996705 | rs12997018 | 0.51 | 0.847343426 | 0.9547 |
| hCV11541681 | rs2001490 | hCV29307907 | rs4852316 | 0.51 | 0.847343426 | 0.9243 |
| hCV11541681 | rs2001490 | hCV303807 | rs17350188 | 0.51 | 0.847343426 | 0.849 |
| hCV11541681 | rs2001490 | hCV31840120 | rs12713798 | 0.51 | 0.847343426 | 0.849 |
| hCV11541681 | rs2001490 | hCV31840129 | rs11126417 | 0.51 | 0.847343426 | 0.849 |
| hCV11541681 | rs2001490 | hCV31840132 | rs2421676 | 0.51 | 0.847343426 | 0.849 |
| hCV11541681 | rs2001490 | hCV31840134 | rs11894953 | 0.51 | 0.847343426 | 0.849 |
| hCV11541681 | rs2001490 | hCV31840136 | rs12713795 | 0.51 | 0.847343426 | 0.8544 |
| hCV11541681 | rs2001490 | hCV31840146 | rs11126415 | 0.51 | 0.847343426 | 0.9268 |
| hCV11541681 | rs2001490 | hCV31840149 | rs12233112 | 0.51 | 0.847343426 | 1 |
| hCV11541681 | rs2001490 | hCV31840152 | rs12998980 | 0.51 | 0.847343426 | 1 |
| hCV11541681 | rs2001490 | hCV31840159 | rs13013228 | 0.51 | 0.847343426 | 1 |
| hCV11541681 | rs2001490 | hCV31840166 | rs4513320 | 0.51 | 0.847343426 | 1 |
| hCV11541681 | rs2001490 | hCV505733 | rs11126416 | 0.51 | 0.847343426 | 0.8544 |
| hCV11541681 | rs2001490 | hCV512569 | rs6755500 | 0.51 | 0.847343426 | 0.9236 |
| hCV11541681 | rs2001490 | hCV95670 | rs4852975 | 0.51 | 0.847343426 | 1 |
| hCV11541681 | rs2001490 | hCV95671 | rs11126414 | 0.51 | 0.847343426 | 1 |
| hCV11541681 | rs2001490 | hCV95672 | rs6750515 | 0.51 | 0.847343426 | 0.8515 |
| hCV11541681 | rs2001490 | hDV68778390 | rs10188074 | 0.51 | 0.847343426 | 0.9596 |
| hCV11541681 | rs2001490 | hDV69785784 | rs13000788 | 0.51 | 0.847343426 | 1 |
| hCV11541681 | rs2001490 | hDV70942181 | rs17350056 | 0.51 | 0.847343426 | 1 |
| hCV11541681 | rs2001490 | hDV70953030 | rs17434634 | 0.51 | 0.847343426 | 1 |
| hCV11541681 | rs2001490 | hDV70953035 | rs17434655 | 0.51 | 0.847343426 | 1 |
| hCV11541681 | rs2001490 | hDV77051911 | rs4852972 | 0.51 | 0.847343426 | 1 |
| hCV11541681 | rs2001490 | hDV77051912 | rs4852976 | 0.51 | 0.847343426 | 0.9243 |
| hCV11786258 | rs4253303 | hCV11786147 | rs4862662 | 0.51 | 0.09882857 | 0.6957 |
| hCV11786258 | rs4253303 | hCV11786203 | rs4253251 | 0.51 | 0.09882857 | 0.1395 |
| hCV11786258 | rs4253303 | hCV11786235 | rs4253287 | 0.51 | 0.09882857 | 0.116 |
| hCV11786258 | rs4253303 | hCV11786259 | rs4253304 | 0.51 | 0.09882857 | 0.8944 |
| hCV11786258 | rs4253303 | hCV12066106 | rs1914926 | 0.51 | 0.09882857 | 0.1036 |
| hCV11786258 | rs4253303 | hCV12066118 | rs2048 | 0.51 | 0.09882857 | 0.5556 |
| hCV11786258 | rs4253303 | hCV12066119 | rs1912826 | 0.51 | 0.09882857 | 0.4905 |
| hCV11786258 | rs4253303 | hCV12066124 | rs2036914 | 0.51 | 0.09882857 | 0.3227 |
| hCV11786258 | rs4253303 | hCV15968025 | rs2292425 | 0.51 | 0.09882857 | 0.3145 |
| hCV11786258 | rs4253303 | hCV15968026 | rs2292426 | 0.51 | 0.09882857 | 0.2823 |
| hCV11786258 | rs4253303 | hCV15968034 | rs2292428 | 0.51 | 0.09882857 | 0.337 |
| hCV11786258 | rs4253303 | hCV15968043 | rs2292423 | 0.51 | 0.09882857 | 0.8913 |
| hCV11786258 | rs4253303 | hCV15975109 | rs2304596 | 0.51 | 0.09882857 | 0.1395 |
| hCV11786258 | rs4253303 | hCV2103343 | rs4241824 | 0.51 | 0.09882857 | 0.255 |
| hCV11786258 | rs4253303 | hCV2103348 | rs11931515 | 0.51 | 0.09882857 | 0.116 |
| hCV11786258 | rs4253303 | hCV2103391 | rs1008728 | 0.51 | 0.09882857 | 0.1419 |
| hCV11786258 | rs4253303 | hCV2103392 | rs12500826 | 0.51 | 0.09882857 | 0.1267 |
| hCV11786258 | rs4253303 | hCV22271609 | rs4253326 | 0.51 | 0.09882857 | 0.1138 |
| hCV11786258 | rs4253303 | hCV22272267 | rs3733402 | 0.51 | 0.09882857 | 0.5632 |
| hCV11786258 | rs4253303 | hCV25474413 | rs3822057 | 0.51 | 0.09882857 | 0.2622 |
| hCV11786258 | rs4253303 | hCV25474414 | rs4253399 | 0.51 | 0.09882857 | 0.2697 |
| hCV11786258 | rs4253303 | hCV25634781 | rs4253299 | 0.51 | 0.09882857 | 0.1325 |
| hCV11786258 | rs4253303 | hCV25989001 | hCV25989001 | 0.51 | 0.09882857 | 0.1474 |
| hCV11786258 | rs4253303 | hCV25990131 | rs13146272 | 0.51 | 0.09882857 | 0.3213 |
| hCV11786258 | rs4253303 | hCV26038139 | rs4253405 | 0.51 | 0.09882857 | 0.1069 |
| hCV11786258 | rs4253303 | hCV26265197 | rs10014399 | 0.51 | 0.09882857 | 0.1412 |
| hCV11786258 | rs4253303 | hCV26265199 | rs2221843 | 0.51 | 0.09882857 | 0.1325 |
| hCV11786258 | rs4253303 | hCV26265231 | rs7684025 | 0.51 | 0.09882857 | 0.5918 |
| hCV11786258 | rs4253303 | hCV27474895 | rs3756011 | 0.51 | 0.09882857 | 0.1518 |
| hCV11786258 | rs4253303 | hCV27477533 | rs3756008 | 0.51 | 0.09882857 | 0.315 |
| hCV11786258 | rs4253303 | hCV27482765 | rs3775301 | 0.51 | 0.09882857 | 0.1395 |
| hCV11786258 | rs4253303 | hCV27506149 | rs3822055 | 0.51 | 0.09882857 | 0.1325 |
| hCV11786258 | rs4253303 | hCV27902808 | rs4253236 | 0.51 | 0.09882857 | 0.366 |
| hCV11786258 | rs4253303 | hCV28960679 | rs6844764 | 0.51 | 0.09882857 | 0.3907 |
| hCV11786258 | rs4253303 | hCV29053260 | rs4861707 | 0.51 | 0.09882857 | 0.1962 |
| hCV11786258 | rs4253303 | hCV29053264 | rs7667777 | 0.51 | 0.09882857 | 0.7578 |
| hCV11786258 | rs4253303 | hCV29053265 | rs4253244 | 0.51 | 0.09882857 | 0.3533 |
| hCV11786258 | rs4253303 | hCV29718000 | rs4253238 | 0.51 | 0.09882857 | 0.5569 |
| hCV11786258 | rs4253303 | hCV29877725 | rs4253295 | 0.51 | 0.09882857 | 1 |
| hCV11786258 | rs4253303 | hCV30983927 | rs6552962 | 0.51 | 0.09882857 | 0.1072 |
| hCV11786258 | rs4253303 | hCV32209636 | rs11132387 | 0.51 | 0.09882857 | 0.2106 |
| hCV11786258 | rs4253303 | hCV32209638 | rs12507040 | 0.51 | 0.09882857 | 0.1024 |
| hCV11786258 | rs4253303 | hCV32291217 | rs4253323 | 0.51 | 0.09882857 | 0.1395 |
| hCV11786258 | rs4253303 | hCV32291269 | rs4253417 | 0.51 | 0.09882857 | 0.2035 |
| hCV11786258 | rs4253303 | hCV32291295 | rs4253292 | 0.51 | 0.09882857 | 0.1404 |
| hCV11786258 | rs4253303 | hCV32291301 | rs4253302 | 0.51 | 0.09882857 | 0.1385 |
| hCV11786258 | rs4253303 | hCV32295028 | rs4253260 | 0.51 | 0.09882857 | 0.1395 |
| hCV11786258 | rs4253303 | hCV3229991 | rs4241815 | 0.51 | 0.09882857 | 0.5632 |
| hCV11786258 | rs4253303 | hCV3229992 | rs3775298 | 0.51 | 0.09882857 | 0.5632 |
| hCV11786258 | rs4253303 | hCV3229995 | rs11132382 | 0.51 | 0.09882857 | 0.5569 |
| hCV11786258 | rs4253303 | hCV3230000 | rs4253294 | 0.51 | 0.09882857 | 0.2479 |
| hCV11786258 | rs4253303 | hCV3230002 | rs4253297 | 0.51 | 0.09882857 | 1 |
| hCV11786258 | rs4253303 | hCV3230003 | rs2304595 | 0.51 | 0.09882857 | 0.8848 |
| hCV11786258 | rs4253303 | hCV3230006 | rs4253308 | 0.51 | 0.09882857 | 1 |
| hCV11786258 | rs4253303 | hCV3230007 | rs4253311 | 0.51 | 0.09882857 | 0.5632 |
| hCV11786258 | rs4253303 | hCV3230011 | rs4253320 | 0.51 | 0.09882857 | 1 |
| hCV11786258 | rs4253303 | hCV3230012 | rs4241821 | 0.51 | 0.09882857 | 0.1325 |
| hCV11786258 | rs4253303 | hCV3230013 | rs3775303 | 0.51 | 0.09882857 | 0.8944 |
| hCV11786258 | rs4253303 | hCV3230014 | rs4861709 | 0.51 | 0.09882857 | 0.2479 |
| hCV11786258 | rs4253303 | hCV3230017 | rs4253327 | 0.51 | 0.09882857 | 0.2534 |
| hCV11786258 | rs4253303 | hCV3230018 | rs925453 | 0.51 | 0.09882857 | 0.2319 |
| hCV11786258 | rs4253303 | hCV3230019 | rs4253332 | 0.51 | 0.09882857 | 0.2319 |
| hCV11786258 | rs4253303 | hCV3230022 | rs11132383 | 0.51 | 0.09882857 | 0.1658 |
| hCV11786258 | rs4253303 | hCV3230025 | rs3756009 | 0.51 | 0.09882857 | 0.2464 |
| hCV11786258 | rs4253303 | hCV3230038 | rs2289252 | 0.51 | 0.09882857 | 0.1956 |
| hCV11786258 | rs4253303 | hCV3230083 | rs10013653 | 0.51 | 0.09882857 | 0.4797 |
| hCV11786258 | rs4253303 | hCV3230084 | rs7682918 | 0.51 | 0.09882857 | 0.5961 |
| hCV11786258 | rs4253303 | hCV3230094 | rs7687818 | 0.51 | 0.09882857 | 0.6447 |
| hCV11786258 | rs4253303 | hCV3230096 | rs3817184 | 0.51 | 0.09882857 | 0.7346 |
| hCV11786258 | rs4253303 | hCV3230097 | rs3736455 | 0.51 | 0.09882857 | 0.2761 |
| hCV11786258 | rs4253303 | hCV3230101 | rs6835839 | 0.51 | 0.09882857 | 0.3578 |
| hCV11786258 | rs4253303 | hCV3230106 | rs1473597 | 0.51 | 0.09882857 | 0.3534 |
| hCV11786258 | rs4253303 | hCV3230110 | rs2276917 | 0.51 | 0.09882857 | 0.337 |
| hCV11786258 | rs4253303 | hCV3230113 | rs1053094 | 0.51 | 0.09882857 | 0.491 |
| hCV11786258 | rs4253303 | hCV3230125 | rs11938564 | 0.51 | 0.09882857 | 0.1367 |
| hCV11786258 | rs4253303 | hCV3230131 | rs13136269 | 0.51 | 0.09882857 | 0.1024 |
| hCV11786258 | rs4253303 | hCV3230133 | rs12511874 | 0.51 | 0.09882857 | 0.1024 |
| hCV11786258 | rs4253303 | hCV3230134 | rs12500151 | 0.51 | 0.09882857 | 0.1024 |
| hCV11786258 | rs4253303 | hCV3230136 | rs13116273 | 0.51 | 0.09882857 | 0.1243 |
| hCV11786258 | rs4253303 | hCV32313006 | rs4253248 | 0.51 | 0.09882857 | 0.5569 |
| hCV11786258 | rs4253303 | hCV32313024 | rs4253239 | 0.51 | 0.09882857 | 0.1404 |
| hCV11786258 | rs4253303 | hCV32358975 | rs4253255 | 0.51 | 0.09882857 | 0.5556 |
| hCV11786258 | rs4253303 | hCV32358984 | rs4253256 | 0.51 | 0.09882857 | 0.3667 |
| hCV11786258 | rs4253303 | hCV8241630 | rs925451 | 0.51 | 0.09882857 | 0.2889 |
| hCV11786258 | rs4253303 | hCV8241631 | rs1511802 | 0.51 | 0.09882857 | 1 |
| hCV11786258 | rs4253303 | hCV8241632 | rs1511801 | 0.51 | 0.09882857 | 0.5625 |
| hCV11786258 | rs4253303 | hDV71222711 | rs4253252 | 0.51 | 0.09882857 | 0.5569 |
| hCV11786258 | rs4253303 | hDV76175111 | rs35079309 | 0.51 | 0.09882857 | 0.1206 |
| hCV11975250 | rs6025 | hCV11341861 | rs10800436 | 0.51 | 0.015514847 | 0.1922 |
| hCV11975250 | rs6025 | hCV11341869 | rs2176473 | 0.51 | 0.015514847 | 0.0375 |
| hCV11975250 | rs6025 | hCV11341876 | rs1980198 | 0.51 | 0.015514847 | 0.0327 |
| hCV11975250 | rs6025 | hCV11341878 | rs4656670 | 0.51 | 0.015514847 | 0.0327 |
| hCV11975250 | rs6025 | hCV11341882 | rs12024897 | 0.51 | 0.015514847 | 0.0327 |
| hCV11975250 | rs6025 | hCV11341898 | rs12563090 | 0.51 | 0.015514847 | 0.0332 |
| hCV11975250 | rs6025 | hCV11342138 | rs2142760 | 0.51 | 0.015514847 | 0.0175 |
| hCV11975250 | rs6025 | hCV11975194 | rs2038024 | 0.51 | 0.015514847 | 0.0613 |
| hCV11975250 | rs6025 | hCV11975195 | rs1894692 | 0.51 | 0.015514847 | 1 |
| hCV11975250 | rs6025 | hCV11975285 | rs6127 | 0.51 | 0.015514847 | 0.026 |
| hCV11975250 | rs6025 | hCV11975296 | rs6131 | 0.51 | 0.015514847 | 0.0848 |
| hCV11975250 | rs6025 | hCV11975318 | rs1883228 | 0.51 | 0.015514847 | 0.0768 |
| hCV11975250 | rs6025 | hCV11975322 | rs5357 | 0.51 | 0.015514847 | 0.0827 |
| hCV11975250 | rs6025 | hCV11975325 | rs5367 | 0.51 | 0.015514847 | 0.1728 |
| hCV11975250 | rs6025 | hCV11975329 | rs5363 | 0.51 | 0.015514847 | 0.1728 |
| hCV11975250 | rs6025 | hCV11975331 | rs5362 | 0.51 | 0.015514847 | 0.1728 |
| hCV11975250 | rs6025 | hCV11975332 | rs5361 | 0.51 | 0.015514847 | 0.1728 |
| hCV11975250 | rs6025 | hCV11975488 | rs2057249 | 0.51 | 0.015514847 | 0.1728 |
| hCV11975250 | rs6025 | hCV15802103 | rs2420370 | 0.51 | 0.015514847 | 0.117 |
| hCV11975250 | rs6025 | hCV15802110 | rs2420371 | 0.51 | 0.015514847 | 0.3415 |
| hCV11975250 | rs6025 | hCV15858911 | rs2806392 | 0.51 | 0.015514847 | 0.1655 |
| hCV11975250 | rs6025 | hCV15868017 | rs2223303 | 0.51 | 0.015514847 | 0.0183 |
| hCV11975250 | rs6025 | hCV15878582 | rs2275299 | 0.51 | 0.015514847 | 0.0327 |
| hCV11975250 | rs6025 | hCV15962928 | rs2285211 | 0.51 | 0.015514847 | 0.0303 |
| hCV11975250 | rs6025 | hCV16161169 | rs2205847 | 0.51 | 0.015514847 | 0.0872 |
| hCV11975250 | rs6025 | hCV16177404 | rs2272920 | 0.51 | 0.015514847 | 0.1655 |
| hCV11975250 | rs6025 | hCV221700 | rs6677410 | 0.51 | 0.015514847 | 0.0327 |
| hCV11975250 | rs6025 | hCV2217923 | rs2014878 | 0.51 | 0.015514847 | 0.159 |
| hCV11975250 | rs6025 | hCV2456693 | rs6672589 | 0.51 | 0.015514847 | 0.0169 |
| hCV11975250 | rs6025 | hCV2456695 | rs10919173 | 0.51 | 0.015514847 | 0.0169 |
| hCV11975250 | rs6025 | hCV2456708 | rs1517745 | 0.51 | 0.015514847 | 0.0544 |
| hCV11975250 | rs6025 | hCV2456730 | rs961404 | 0.51 | 0.015514847 | 0.0327 |
| hCV11975250 | rs6025 | hCV2456733 | rs12021580 | 0.51 | 0.015514847 | 0.0168 |
| hCV11975250 | rs6025 | hCV2456741 | rs6696810 | 0.51 | 0.015514847 | 0.0327 |
| hCV11975250 | rs6025 | hCV2456747 | rs3820059 | 0.51 | 0.015514847 | 0.0423 |
| hCV11975250 | rs6025 | hCV2456768 | rs6427186 | 0.51 | 0.015514847 | 0.0327 |
| hCV11975250 | rs6025 | hCV2459402 | rs12045330 | 0.51 | 0.015514847 | 0.0369 |
| hCV11975250 | rs6025 | hCV2459404 | rs6663862 | 0.51 | 0.015514847 | 0.0763 |
| hCV11975250 | rs6025 | hCV2459408 | rs7531806 | 0.51 | 0.015514847 | 0.0171 |
| hCV11975250 | rs6025 | hCV2459420 | rs4987351 | 0.51 | 0.015514847 | 0.0246 |
| hCV11975250 | rs6025 | hCV2459428 | rs4987285 | 0.51 | 0.015514847 | 0.0804 |
| hCV11975250 | rs6025 | hCV2459446 | rs4786 | 0.51 | 0.015514847 | 0.0799 |
| hCV11975250 | rs6025 | hCV2459453 | rs3917419 | 0.51 | 0.015514847 | 0.0192 |
| hCV11975250 | rs6025 | hCV2459459 | rs932307 | 0.51 | 0.015514847 | 0.0872 |
| hCV11975250 | rs6025 | hCV2459460 | rs5353 | 0.51 | 0.015514847 | 0.0839 |
| hCV11975250 | rs6025 | hCV2480400 | rs1569474 | 0.51 | 0.015514847 | 0.0436 |
| hCV11975250 | rs6025 | hCV2480404 | rs7551819 | 0.51 | 0.015514847 | 0.0183 |
| hCV11975250 | rs6025 | hCV2480416 | rs732314 | 0.51 | 0.015514847 | 0.0196 |
| hCV11975250 | rs6025 | hCV2480424 | rs2244529 | 0.51 | 0.015514847 | 0.0523 |
| hCV11975250 | rs6025 | hCV2480428 | rs3917740 | 0.51 | 0.015514847 | 0.0725 |
| hCV11975250 | rs6025 | hCV2481727 | rs6670407 | 0.51 | 0.015514847 | 0.0281 |
| hCV11975250 | rs6025 | hCV2481731 | rs9332640 | 0.51 | 0.015514847 | 0.0271 |
| hCV11975250 | rs6025 | hCV2481732 | rs12131397 | 0.51 | 0.015514847 | 0.0273 |
| hCV11975250 | rs6025 | hCV25616192 | rs10919168 | 0.51 | 0.015514847 | 0.0534 |
| hCV11975250 | rs6025 | hCV25617131 | rs3917410 | 0.51 | 0.015514847 | 0.1718 |
| hCV11975250 | rs6025 | hCV25617143 | rs3917425 | 0.51 | 0.015514847 | 0.1728 |
| hCV11975250 | rs6025 | hCV25619707 | rs4987308 | 0.51 | 0.015514847 | 0.0827 |
| hCV11975250 | rs6025 | hCV25921520 | rs12132173 | 0.51 | 0.015514847 | 0.1726 |
| hCV11975250 | rs6025 | hCV25922175 | rs12120229 | 0.51 | 0.015514847 | 0.1728 |
| hCV11975250 | rs6025 | hCV27242639 | rs7544221 | 0.51 | 0.015514847 | 0.0413 |
| hCV11975250 | rs6025 | hCV27242706 | rs7524348 | 0.51 | 0.015514847 | 0.0169 |
| hCV11975250 | rs6025 | hCV27242742 | rs12408451 | 0.51 | 0.015514847 | 0.0278 |
| hCV11975250 | rs6025 | hCV27243253 | rs2420505 | 0.51 | 0.015514847 | 0.1007 |
| hCV11975250 | rs6025 | hCV27478380 | rs3766141 | 0.51 | 0.015514847 | 0.1655 |
| hCV11975250 | rs6025 | hCV27480806 | rs3766129 | 0.51 | 0.015514847 | 0.0347 |
| hCV11975250 | rs6025 | hCV27497504 | rs3917683 | 0.51 | 0.015514847 | 0.0162 |
| hCV11975250 | rs6025 | hCV27523232 | rs3917681 | 0.51 | 0.015514847 | 0.0583 |
| hCV11975250 | rs6025 | hCV27886241 | rs4656690 | 0.51 | 0.015514847 | 0.0449 |
| hCV11975250 | rs6025 | hCV27886249 | rs3917406 | 0.51 | 0.015514847 | 0.0349 |
| hCV11975250 | rs6025 | hCV279320 | rs10800441 | 0.51 | 0.015514847 | 0.0327 |
| hCV11975250 | rs6025 | hCV27936996 | rs4656697 | 0.51 | 0.015514847 | 0.033 |
| hCV11975250 | rs6025 | hCV28023624 | rs4656704 | 0.51 | 0.015514847 | 0.0804 |
| hCV11975250 | rs6025 | hCV29397237 | rs6427185 | 0.51 | 0.015514847 | 0.0423 |
| hCV11975250 | rs6025 | hCV29397245 | rs6656822 | 0.51 | 0.015514847 | 0.0571 |
| hCV11975250 | rs6025 | hCV29397247 | rs6427194 | 0.51 | 0.015514847 | 0.1171 |
| hCV11975250 | rs6025 | hCV29397248 | rs6427195 | 0.51 | 0.015514847 | 0.2959 |
| hCV11975250 | rs6025 | hCV29397252 | rs6427197 | 0.51 | 0.015514847 | 0.2959 |
| hCV11975250 | rs6025 | hCV29397255 | rs6427202 | 0.51 | 0.015514847 | 0.0281 |
| hCV11975250 | rs6025 | hCV29397262 | rs3917786 | 0.51 | 0.015514847 | 0.0276 |
| hCV11975250 | rs6025 | hCV29397289 | rs4656198 | 0.51 | 0.015514847 | 0.1007 |
| hCV11975250 | rs6025 | hCV29585595 | rs10489173 | 0.51 | 0.015514847 | 0.1655 |
| hCV11975250 | rs6025 | hCV29748285 | rs6687813 | 0.51 | 0.015514847 | 0.3169 |
| hCV11975250 | rs6025 | hCV29820280 | rs6696217 | 0.51 | 0.015514847 | 0.2454 |
| hCV11975250 | rs6025 | hCV30036721 | rs3917449 | 0.51 | 0.015514847 | 0.0183 |
| hCV11975250 | rs6025 | hCV30126935 | rs6692451 | 0.51 | 0.015514847 | 0.1071 |
| hCV11975250 | rs6025 | hCV30324835 | rs10489183 | 0.51 | 0.015514847 | 0.0751 |
| hCV11975250 | rs6025 | hCV30631277 | rs10489182 | 0.51 | 0.015514847 | 0.0439 |
| hCV11975250 | rs6025 | hCV32141371 | rs10800447 | 0.51 | 0.015514847 | 0.0534 |
| hCV11975250 | rs6025 | hCV32141374 | rs10919174 | 0.51 | 0.015514847 | 0.0183 |
| hCV11975250 | rs6025 | hCV32141406 | rs10737547 | 0.51 | 0.015514847 | 0.1348 |
| hCV11975250 | rs6025 | hCV32141457 | rs6678795 | 0.51 | 0.015514847 | 0.0226 |
| hCV11975250 | rs6025 | hCV32141484 | rs3917768 | 0.51 | 0.015514847 | 0.0159 |
| hCV11975250 | rs6025 | hCV32141485 | rs3917744 | 0.51 | 0.015514847 | 0.0407 |
| hCV11975250 | rs6025 | hCV32141499 | rs3917862 | 0.51 | 0.015514847 | 0.1954 |
| hCV11975250 | rs6025 | hCV32141505 | rs3917657 | 0.51 | 0.015514847 | 0.1023 |
| hCV11975250 | rs6025 | hCV32141519 | rs12131631 | 0.51 | 0.015514847 | 0.1222 |
| hCV11975250 | rs6025 | hCV32141520 | rs12123695 | 0.51 | 0.015514847 | 0.0578 |
| hCV11975250 | rs6025 | hCV32141521 | rs10800462 | 0.51 | 0.015514847 | 0.0178 |
| hCV11975250 | rs6025 | hCV32141522 | rs12126695 | 0.51 | 0.015514847 | 0.0631 |
| hCV11975250 | rs6025 | hCV32141523 | rs10919204 | 0.51 | 0.015514847 | 0.0631 |
| hCV11975250 | rs6025 | hCV32141527 | rs10919207 | 0.51 | 0.015514847 | 0.0631 |
| hCV11975250 | rs6025 | hCV32141586 | rs12137905 | 0.51 | 0.015514847 | 0.0827 |
| hCV11975250 | rs6025 | hCV32141621 | rs12133642 | 0.51 | 0.015514847 | 0.1728 |
| hCV11975250 | rs6025 | hCV32141622 | rs12133666 | 0.51 | 0.015514847 | 0.1011 |
| hCV11975250 | rs6025 | hCV32141631 | rs3917436 | 0.51 | 0.015514847 | 0.0801 |
| hCV11975250 | rs6025 | hCV32141639 | rs3917411 | 0.51 | 0.015514847 | 0.1728 |
| hCV11975250 | rs6025 | hCV32141645 | rs3917452 | 0.51 | 0.015514847 | 0.1726 |
| hCV11975250 | rs6025 | hCV32141663 | rs12142587 | 0.51 | 0.015514847 | 0.0826 |
| hCV11975250 | rs6025 | hCV32141665 | rs10800470 | 0.51 | 0.015514847 | 0.0462 |
| hCV11975250 | rs6025 | hCV32141669 | rs10800472 | 0.51 | 0.015514847 | 0.0467 |
| hCV11975250 | rs6025 | hCV32141741 | rs12135361 | 0.51 | 0.015514847 | 0.1655 |
| hCV11975250 | rs6025 | hCV32141779 | rs12122767 | 0.51 | 0.015514847 | 0.14 |
| hCV11975250 | rs6025 | hCV32141799 | rs12133074 | 0.51 | 0.015514847 | 0.1655 |
| hCV11975250 | rs6025 | hCV32141820 | rs12132384 | 0.51 | 0.015514847 | 0.1655 |
| hCV11975250 | rs6025 | hCV32141821 | rs12135726 | 0.51 | 0.015514847 | 0.1655 |
| hCV11975250 | rs6025 | hCV32141828 | rs12136425 | 0.51 | 0.015514847 | 0.1655 |
| hCV11975250 | rs6025 | hCV32141844 | rs12142093 | 0.51 | 0.015514847 | 0.1655 |
| hCV11975250 | rs6025 | hCV32141847 | rs12143057 | 0.51 | 0.015514847 | 0.1655 |
| hCV11975250 | rs6025 | hCV32141873 | rs12131357 | 0.51 | 0.015514847 | 0.1803 |
| hCV11975250 | rs6025 | hCV32141874 | rs12121045 | 0.51 | 0.015514847 | 0.1655 |
| hCV11975250 | rs6025 | hCV32141888 | rs12124561 | 0.51 | 0.015514847 | 0.1655 |
| hCV11975250 | rs6025 | hCV32141892 | rs12125595 | 0.51 | 0.015514847 | 0.1655 |
| hCV11975250 | rs6025 | hCV32141893 | rs12125679 | 0.51 | 0.015514847 | 0.1655 |
| hCV11975250 | rs6025 | hCV32141894 | rs12128308 | 0.51 | 0.015514847 | 0.1587 |
| hCV11975250 | rs6025 | hCV32141903 | rs12131192 | 0.51 | 0.015514847 | 0.1655 |
| hCV11975250 | rs6025 | hCV32141968 | rs12124907 | 0.51 | 0.015514847 | 0.1728 |
| hCV11975250 | rs6025 | hCV32141971 | rs12118305 | 0.51 | 0.015514847 | 0.1018 |
| hCV11975250 | rs6025 | hCV32398748 | rs3917417 | 0.51 | 0.015514847 | 0.1167 |
| hCV11975250 | rs6025 | hCV32398763 | rs3917392 | 0.51 | 0.015514847 | 0.1728 |
| hCV11975250 | rs6025 | hCV325211 | rs3753305 | 0.51 | 0.015514847 | 0.0251 |
| hCV11975250 | rs6025 | hCV325253 | rs2236868 | 0.51 | 0.015514847 | 0.0246 |
| hCV11975250 | rs6025 | hCV337817 | rs9332586 | 0.51 | 0.015514847 | 0.0178 |
| hCV11975250 | rs6025 | hCV474695 | rs10800463 | 0.51 | 0.015514847 | 0.0244 |
| hCV11975250 | rs6025 | hCV574681 | rs575147 | 0.51 | 0.015514847 | 0.1072 |
| hCV11975250 | rs6025 | hCV574682 | rs590181 | 0.51 | 0.015514847 | 0.1655 |
| hCV11975250 | rs6025 | hCV574683 | rs544008 | 0.51 | 0.015514847 | 0.1655 |
| hCV11975250 | rs6025 | hCV574693 | rs601355 | 0.51 | 0.015514847 | 0.1655 |
| hCV11975250 | rs6025 | hCV574707 | rs565397 | 0.51 | 0.015514847 | 0.1655 |
| hCV11975250 | rs6025 | hCV574726 | rs664962 | 0.51 | 0.015514847 | 0.1655 |
| hCV11975250 | rs6025 | hCV574743 | rs545963 | 0.51 | 0.015514847 | 0.1724 |
| hCV11975250 | rs6025 | hCV574757 | rs654664 | 0.51 | 0.015514847 | 0.1728 |
| hCV11975250 | rs6025 | hCV574764 | rs638486 | 0.51 | 0.015514847 | 0.1728 |
| hCV11975250 | rs6025 | hCV574785 | rs511609 | 0.51 | 0.015514847 | 0.1583 |
| hCV11975250 | rs6025 | hCV574788 | rs629408 | 0.51 | 0.015514847 | 0.1726 |
| hCV11975250 | rs6025 | hCV574789 | rs629421 | 0.51 | 0.015514847 | 0.1726 |
| hCV11975250 | rs6025 | hCV8688930 | rs3905328 | 0.51 | 0.015514847 | 0.043 |
| hCV11975250 | rs6025 | hCV8690976 | rs1124843 | 0.51 | 0.015514847 | 0.0423 |
| hCV11975250 | rs6025 | hCV8697031 | rs1400836 | 0.51 | 0.015514847 | 0.0423 |
| hCV11975250 | rs6025 | hCV8697043 | rs1517747 | 0.51 | 0.015514847 | 0.0183 |
| hCV11975250 | rs6025 | hCV8697049 | rs1517744 | 0.51 | 0.015514847 | 0.0559 |
| hCV11975250 | rs6025 | hCV8697055 | rs1208134 | 0.51 | 0.015514847 | 0.1939 |
| hCV11975250 | rs6025 | hCV8697995 | rs4519 | 0.51 | 0.015514847 | 0.1655 |
| hCV11975250 | rs6025 | hCV8698056 | rs488488 | 0.51 | 0.015514847 | 0.117 |
| hCV11975250 | rs6025 | hCV8698071 | rs673789 | 0.51 | 0.015514847 | 0.1655 |
| hCV11975250 | rs6025 | hCV8919425 | rs970740 | 0.51 | 0.015514847 | 0.1171 |
| hCV11975250 | rs6025 | hCV8919431 | rs6009 | 0.51 | 0.015514847 | 0.2959 |
| hCV11975250 | rs6025 | hCV8919452 | rs1018827 | 0.51 | 0.015514847 | 0.2769 |
| hCV11975250 | rs6025 | hCV8919485 | rs1800808 | 0.51 | 0.015514847 | 0.0583 |
| hCV11975250 | rs6025 | hCV8919492 | rs1569476 | 0.51 | 0.015514847 | 0.0303 |
| hCV11975250 | rs6025 | hCV8919494 | rs1011267 | 0.51 | 0.015514847 | 0.0194 |
| hCV11975250 | rs6025 | hCV8919500 | rs1011266 | 0.51 | 0.015514847 | 0.131 |
| hCV11975250 | rs6025 | hCV8919501 | rs909628 | 0.51 | 0.015514847 | 0.1728 |
| hCV11975250 | rs6025 | hCV8919509 | rs1051091 | 0.51 | 0.015514847 | 0.0872 |
| hCV11975250 | rs6025 | hCV8919515 | rs1569457 | 0.51 | 0.015514847 | 0.0827 |
| hCV11975250 | rs6025 | hCV8919527 | rs1800016 | 0.51 | 0.015514847 | 0.1655 |
| hCV11975250 | rs6025 | hCV8919528 | rs1800015 | 0.51 | 0.015514847 | 0.1728 |
| hCV11975250 | rs6025 | hCV8919530 | rs1805193 | 0.51 | 0.015514847 | 0.1728 |
| hCV11975250 | rs6025 | hCV9945935 | rs3917750 | 0.51 | 0.015514847 | 0.0183 |
| hCV11975250 | rs6025 | hDV70670007 | rs16828222 | 0.51 | 0.015514847 | 0.1655 |
| hCV11975250 | rs6025 | hDV70694593 | rs16861990 | 0.51 | 0.015514847 | 0.1939 |
| hCV11975250 | rs6025 | hDV70695296 | rs16862919 | 0.51 | 0.015514847 | 0.189 |
| hCV11975250 | rs6025 | hDV70695328 | rs16862956 | 0.51 | 0.015514847 | 0.116 |
| hCV11975250 | rs6025 | hDV70695338 | rs16862968 | 0.51 | 0.015514847 | 0.1728 |
| hCV11975250 | rs6025 | hDV70965007 | rs17529304 | 0.51 | 0.015514847 | 0.1655 |
| hCV11975250 | rs6025 | hDV70966798 | rs17543370 | 0.51 | 0.015514847 | 0.1651 |
| hCV11975250 | rs6025 | hDV70966830 | rs17543611 | 0.51 | 0.015514847 | 0.1655 |
| hCV11975250 | rs6025 | hDV70974851 | rs17601631 | 0.51 | 0.015514847 | 0.1655 |
| hCV11975250 | rs6025 | hDV70975002 | rs17602701 | 0.51 | 0.015514847 | 0.1651 |
| hCV11975250 | rs6025 | hDV70975134 | rs17603666 | 0.51 | 0.015514847 | 0.1655 |
| hCV11975250 | rs6025 | hDV71028805 | rs4987299 | 0.51 | 0.015514847 | 0.1728 |
| hCV11975250 | rs6025 | hDV71028807 | rs4987302 | 0.51 | 0.015514847 | 0.0827 |
| hCV11975250 | rs6025 | hDV71028808 | rs4987304 | 0.51 | 0.015514847 | 0.0827 |
| hCV11975250 | rs6025 | hDV71028809 | rs4987307 | 0.51 | 0.015514847 | 0.0827 |
| hCV11975250 | rs6025 | hDV71028811 | rs4987318 | 0.51 | 0.015514847 | 0.033 |
| hCV11975250 | rs6025 | hDV71028814 | rs4987323 | 0.51 | 0.015514847 | 0.1728 |
| hCV11975250 | rs6025 | hDV71028815 | rs4987324 | 0.51 | 0.015514847 | 0.1728 |
| hCV11975250 | rs6025 | hDV71028816 | rs4987325 | 0.51 | 0.015514847 | 0.0827 |
| hCV11975250 | rs6025 | hDV71028819 | rs4987340 | 0.51 | 0.015514847 | 0.0827 |
| hCV11975250 | rs6025 | hDV71028821 | rs4987343 | 0.51 | 0.015514847 | 0.0827 |
| hCV11975250 | rs6025 | hDV71028822 | rs4987345 | 0.51 | 0.015514847 | 0.0826 |
| hCV11975250 | rs6025 | hDV71028828 | rs4987395 | 0.51 | 0.015514847 | 0.0827 |
| hCV11975250 | rs6025 | hDV71070471 | rs4987363 | 0.51 | 0.015514847 | 0.1728 |
| hCV11975250 | rs6025 | hDV76908547 | rs3917400 | 0.51 | 0.015514847 | 0.103 |
| hCV11975250 | rs6025 | hDV76908557 | rs3917427 | 0.51 | 0.015514847 | 0.1728 |
| hCV11975250 | rs6025 | hDV76908563 | rs3917441 | 0.51 | 0.015514847 | 0.103 |
| hCV11975250 | rs6025 | hDV76908571 | rs3917454 | 0.51 | 0.015514847 | 0.25 |
| hCV11975250 | rs6025 | hDV76908576 | rs3917461 | 0.51 | 0.015514847 | 0.1592 |
| hCV11975250 | rs6025 | hDV76908651 | rs3917729 | 0.51 | 0.015514847 | 0.0583 |
| hCV11975250 | rs6025 | hDV77030725 | rs4656701 | 0.51 | 0.015514847 | 0.0804 |
| hCV11975250 | rs6025 | hDV77030727 | rs4656703 | 0.51 | 0.015514847 | 0.0804 |
| hCV12066124 | rs2036914 | hCV11786147 | rs4862662 | 0.51 | 0.050680687 | 0.2824 |
| hCV12066124 | rs2036914 | hCV11786203 | rs4253251 | 0.51 | 0.050680687 | 0.0507 |
| hCV12066124 | rs2036914 | hCV11786235 | rs4253287 | 0.51 | 0.050680687 | 0.0572 |
| hCV12066124 | rs2036914 | hCV11786258 | rs4253303 | 0.51 | 0.050680687 | 0.3227 |
| hCV12066124 | rs2036914 | hCV11786259 | rs4253304 | 0.51 | 0.050680687 | 0.3572 |
| hCV12066124 | rs2036914 | hCV11786295 | rs4253421 | 0.51 | 0.050680687 | 0.1004 |
| hCV12066124 | rs2036914 | hCV11786307 | rs1062547 | 0.51 | 0.050680687 | 0.4099 |
| hCV12066124 | rs2036914 | hCV11786327 | rs13133050 | 0.51 | 0.050680687 | 0.1901 |
| hCV12066124 | rs2036914 | hCV12066116 | rs1877320 | 0.51 | 0.050680687 | 0.1385 |
| hCV12066124 | rs2036914 | hCV12066118 | rs2048 | 0.51 | 0.050680687 | 0.3579 |
| hCV12066124 | rs2036914 | hCV12066119 | rs1912826 | 0.51 | 0.050680687 | 0.3713 |
| hCV12066124 | rs2036914 | hCV12066129 | rs1593 | 0.51 | 0.050680687 | 0.1505 |
| hCV12066124 | rs2036914 | hCV12086148 | rs1877321 | 0.51 | 0.050680687 | 0.0621 |
| hCV12066124 | rs2036914 | hCV15793897 | rs3087505 | 0.51 | 0.050680687 | 0.1103 |
| hCV12066124 | rs2036914 | hCV15811716 | rs2102575 | 0.51 | 0.050680687 | 0.1039 |
| hCV12066124 | rs2036914 | hCV15968025 | rs2292425 | 0.51 | 0.050680687 | 0.175 |
| hCV12066124 | rs2036914 | hCV15968026 | rs2292426 | 0.51 | 0.050680687 | 0.2128 |
| hCV12066124 | rs2036914 | hCV15968034 | rs2292428 | 0.51 | 0.050680687 | 0.181 |
| hCV12066124 | rs2036914 | hCV15968043 | rs2292423 | 0.51 | 0.050680687 | 0.3742 |
| hCV12066124 | rs2036914 | hCV15975109 | rs2304596 | 0.51 | 0.050680687 | 0.0738 |
| hCV12066124 | rs2036914 | hCV16172925 | rs2241818 | 0.51 | 0.050680687 | 0.0795 |
| hCV12066124 | rs2036914 | hCV16172935 | rs2241817 | 0.51 | 0.050680687 | 0.4102 |
| hCV12066124 | rs2036914 | hCV2103337 | rs13102931 | 0.51 | 0.050680687 | 0.0611 |
| hCV12066124 | rs2036914 | hCV2103343 | rs4241824 | 0.51 | 0.050680687 | 0.9265 |
| hCV12066124 | rs2036914 | hCV2103375 | rs12502630 | 0.51 | 0.050680687 | 0.0643 |
| hCV12066124 | rs2036914 | hCV2103388 | rs4613610 | 0.51 | 0.050680687 | 0.0917 |
| hCV12066124 | rs2036914 | hCV2103391 | rs1008728 | 0.51 | 0.050680687 | 0.2419 |
| hCV12066124 | rs2036914 | hCV2103392 | rs12500826 | 0.51 | 0.050680687 | 0.3937 |
| hCV12066124 | rs2036914 | hCV2103401 | rs7687352 | 0.51 | 0.050680687 | 0.0531 |
| hCV12066124 | rs2036914 | hCV2103402 | rs9993749 | 0.51 | 0.050680687 | 0.0695 |
| hCV12066124 | rs2036914 | hCV22272267 | rs3733402 | 0.51 | 0.050680687 | 0.3605 |
| hCV12066124 | rs2036914 | hCV25474413 | rs3822057 | 0.51 | 0.050680687 | 0.9449 |
| hCV12066124 | rs2036914 | hCV25474414 | rs4253399 | 0.51 | 0.050680687 | 0.5632 |
| hCV12066124 | rs2036914 | hCV25634763 | rs4253241 | 0.51 | 0.050680687 | 0.0841 |
| hCV12066124 | rs2036914 | hCV25988221 | rs9995366 | 0.51 | 0.050680687 | 0.0931 |
| hCV12066124 | rs2036914 | hCV25989001 | hCV25989001 | 0.51 | 0.050680687 | 0.0578 |
| hCV12066124 | rs2036914 | hCV25990131 | rs13146272 | 0.51 | 0.050680687 | 0.1776 |
| hCV12066124 | rs2036914 | hCV26038139 | rs4253405 | 0.51 | 0.050680687 | 0.5831 |
| hCV12066124 | rs2036914 | hCV26265197 | rs10014399 | 0.51 | 0.050680687 | 0.0507 |
| hCV12066124 | rs2036914 | hCV26265231 | rs7684025 | 0.51 | 0.050680687 | 0.3217 |
| hCV12066124 | rs2036914 | hCV27309991 | rs4572916 | 0.51 | 0.050680687 | 0.1646 |
| hCV12066124 | rs2036914 | hCV27473099 | rs3733403 | 0.51 | 0.050680687 | 0.1015 |
| hCV12066124 | rs2036914 | hCV27474895 | rs3756011 | 0.51 | 0.050680687 | 0.4851 |
| hCV12066124 | rs2036914 | hCV27477533 | rs3756008 | 0.51 | 0.050680687 | 0.5443 |
| hCV12066124 | rs2036914 | hCV27482765 | rs3775301 | 0.51 | 0.050680687 | 0.0738 |
| hCV12066124 | rs2036914 | hCV27490984 | rs3822058 | 0.51 | 0.050680687 | 0.4255 |
| hCV12066124 | rs2036914 | hCV27521729 | rs3822056 | 0.51 | 0.050680687 | 0.1148 |
| hCV12066124 | rs2036914 | hCV27902803 | rs4862665 | 0.51 | 0.050680687 | 0.0931 |
| hCV12066124 | rs2036914 | hCV27902808 | rs4253236 | 0.51 | 0.050680687 | 0.1725 |
| hCV12066124 | rs2036914 | hCV28960679 | rs6844764 | 0.51 | 0.050680687 | 0.1096 |
| hCV12066124 | rs2036914 | hCV29053261 | rs6842047 | 0.51 | 0.050680687 | 0.1103 |
| hCV12066124 | rs2036914 | hCV29053264 | rs7667777 | 0.51 | 0.050680687 | 0.2682 |
| hCV12066124 | rs2036914 | hCV29053265 | rs4253244 | 0.51 | 0.050680687 | 0.1619 |
| hCV12066124 | rs2036914 | hCV29419315 | rs6841024 | 0.51 | 0.050680687 | 0.1051 |
| hCV12066124 | rs2036914 | hCV29640635 | rs10029715 | 0.51 | 0.050680687 | 0.099 |
| hCV12066124 | rs2036914 | hCV29718000 | rs4253238 | 0.51 | 0.050680687 | 0.4135 |
| hCV12066124 | rs2036914 | hCV29826351 | rs10025990 | 0.51 | 0.050680687 | 0.1626 |
| hCV12066124 | rs2036914 | hCV29877725 | rs4253295 | 0.51 | 0.050680687 | 0.3398 |
| hCV12066124 | rs2036914 | hCV30307525 | rs10025152 | 0.51 | 0.050680687 | 0.099 |
| hCV12066124 | rs2036914 | hCV30492573 | rs10471184 | 0.51 | 0.050680687 | 0.1103 |
| hCV12066124 | rs2036914 | hCV30562347 | rs4253418 | 0.51 | 0.050680687 | 0.0632 |
| hCV12066124 | rs2036914 | hCV30983902 | rs4862668 | 0.51 | 0.050680687 | 0.1385 |
| hCV12066124 | rs2036914 | hCV30983907 | rs4253246 | 0.51 | 0.050680687 | 0.0841 |
| hCV12066124 | rs2036914 | hCV30983927 | rs6552962 | 0.51 | 0.050680687 | 0.0526 |
| hCV12066124 | rs2036914 | hCV32209629 | rs12715865 | 0.51 | 0.050680687 | 0.1168 |
| hCV12066124 | rs2036914 | hCV32209636 | rs11132387 | 0.51 | 0.050680687 | 0.4117 |
| hCV12066124 | rs2036914 | hCV32209637 | rs13143773 | 0.51 | 0.050680687 | 0.3327 |
| hCV12066124 | rs2036914 | hCV32209638 | rs12507040 | 0.51 | 0.050680687 | 0.387 |
| hCV12066124 | rs2036914 | hCV32291217 | rs4253323 | 0.51 | 0.050680687 | 0.0738 |
| hCV12066124 | rs2036914 | hCV32291256 | rs4253406 | 0.51 | 0.050680687 | 0.0631 |
| hCV12066124 | rs2036914 | hCV32291269 | rs4253417 | 0.51 | 0.050680687 | 0.389 |
| hCV12066124 | rs2036914 | hCV32291286 | rs4253422 | 0.51 | 0.050680687 | 0.2525 |
| hCV12066124 | rs2036914 | hCV32291287 | rs4253423 | 0.51 | 0.050680687 | 0.2525 |
| hCV12066124 | rs2036914 | hCV32291295 | rs4253292 | 0.51 | 0.050680687 | 0.1224 |
| hCV12066124 | rs2036914 | hCV32291301 | rs4253302 | 0.51 | 0.050680687 | 0.0694 |
| hCV12066124 | rs2036914 | hCV32295028 | rs4253260 | 0.51 | 0.050680687 | 0.0738 |
| hCV12066124 | rs2036914 | hCV3229991 | rs4241815 | 0.51 | 0.050680687 | 0.3605 |
| hCV12066124 | rs2036914 | hCV3229992 | rs3775298 | 0.51 | 0.050680687 | 0.3605 |
| hCV12066124 | rs2036914 | hCV3229995 | rs11132382 | 0.51 | 0.050680687 | 0.3958 |
| hCV12066124 | rs2036914 | hCV3230000 | rs4253294 | 0.51 | 0.050680687 | 0.1496 |
| hCV12066124 | rs2036914 | hCV3230001 | rs4253296 | 0.51 | 0.050680687 | 0.0841 |
| hCV12066124 | rs2036914 | hCV3230002 | rs4253297 | 0.51 | 0.050680687 | 0.3058 |
| hCV12066124 | rs2036914 | hCV3230003 | rs2304595 | 0.51 | 0.050680687 | 0.4092 |
| hCV12066124 | rs2036914 | hCV3230004 | rs4253301 | 0.51 | 0.050680687 | 0.1069 |
| hCV12066124 | rs2036914 | hCV3230006 | rs4253308 | 0.51 | 0.050680687 | 0.3398 |
| hCV12066124 | rs2036914 | hCV3230007 | rs4253311 | 0.51 | 0.050680687 | 0.3605 |
| hCV12066124 | rs2036914 | hCV3230011 | rs4253320 | 0.51 | 0.050680687 | 0.3058 |
| hCV12066124 | rs2036914 | hCV3230013 | rs3775303 | 0.51 | 0.050680687 | 0.3572 |
| hCV12066124 | rs2036914 | hCV3230014 | rs4861709 | 0.51 | 0.050680687 | 0.1496 |
| hCV12066124 | rs2036914 | hCV3230017 | rs4253327 | 0.51 | 0.050680687 | 0.0613 |
| hCV12066124 | rs2036914 | hCV3230018 | rs925453 | 0.51 | 0.050680687 | 0.1526 |
| hCV12066124 | rs2036914 | hCV3230019 | rs4253332 | 0.51 | 0.050680687 | 0.1452 |
| hCV12066124 | rs2036914 | hCV3230021 | rs13135645 | 0.51 | 0.050680687 | 0.154 |
| hCV12066124 | rs2036914 | hCV3230022 | rs11132383 | 0.51 | 0.050680687 | 0.1678 |
| hCV12066124 | rs2036914 | hCV3230025 | rs3756009 | 0.51 | 0.050680687 | 0.5789 |
| hCV12066124 | rs2036914 | hCV3230030 | rs4253408 | 0.51 | 0.050680687 | 0.0667 |
| hCV12066124 | rs2036914 | hCV3230031 | rs4253419 | 0.51 | 0.050680687 | 0.2525 |
| hCV12066124 | rs2036914 | hCV3230038 | rs2289252 | 0.51 | 0.050680687 | 0.3834 |
| hCV12066124 | rs2036914 | hCV3230083 | rs10013653 | 0.51 | 0.050680687 | 0.3086 |
| hCV12066124 | rs2036914 | hCV3230084 | rs7682918 | 0.51 | 0.050680687 | 0.2285 |
| hCV12066124 | rs2036914 | hCV3230094 | rs7687818 | 0.51 | 0.050680687 | 0.3495 |
| hCV12066124 | rs2036914 | hCV3230096 | rs3817184 | 0.51 | 0.050680687 | 0.2824 |
| hCV12066124 | rs2036914 | hCV3230097 | rs3736455 | 0.51 | 0.050680687 | 0.2379 |
| hCV12066124 | rs2036914 | hCV3230101 | rs6835839 | 0.51 | 0.050680687 | 0.1143 |
| hCV12066124 | rs2036914 | hCV3230106 | rs1473597 | 0.51 | 0.050680687 | 0.1783 |
| hCV12066124 | rs2036914 | hCV3230110 | rs2276917 | 0.51 | 0.050680687 | 0.1882 |
| hCV12066124 | rs2036914 | hCV3230113 | rs1053094 | 0.51 | 0.050680687 | 0.3142 |
| hCV12066124 | rs2036914 | hCV3230118 | rs4253429 | 0.51 | 0.050680687 | 0.2525 |
| hCV12066124 | rs2036914 | hCV3230119 | rs4253430 | 0.51 | 0.050680687 | 0.4139 |
| hCV12066124 | rs2036914 | hCV3230125 | rs11938564 | 0.51 | 0.050680687 | 0.3091 |
| hCV12066124 | rs2036914 | hCV3230131 | rs13136269 | 0.51 | 0.050680687 | 0.387 |
| hCV12066124 | rs2036914 | hCV3230133 | rs12511874 | 0.51 | 0.050680687 | 0.3354 |
| hCV12066124 | rs2036914 | hCV3230134 | rs12500151 | 0.51 | 0.050680687 | 0.3713 |
| hCV12066124 | rs2036914 | hCV3230136 | rs13116273 | 0.51 | 0.050680687 | 0.3869 |
| hCV12066124 | rs2036914 | hCV32313006 | rs4253248 | 0.51 | 0.050680687 | 0.4015 |
| hCV12066124 | rs2036914 | hCV32313007 | rs4862666 | 0.51 | 0.050680687 | 0.0931 |
| hCV12066124 | rs2036914 | hCV32313024 | rs4253239 | 0.51 | 0.050680687 | 0.1224 |
| hCV12066124 | rs2036914 | hCV32358975 | rs4253255 | 0.51 | 0.050680687 | 0.3463 |
| hCV12066124 | rs2036914 | hCV32358984 | rs4253256 | 0.51 | 0.050680687 | 0.1734 |
| hCV12066124 | rs2036914 | hCV8241628 | rs907439 | 0.51 | 0.050680687 | 0.1646 |
| hCV12066124 | rs2036914 | hCV8241630 | rs925451 | 0.51 | 0.050680687 | 0.5632 |
| hCV12066124 | rs2036914 | hCV8241631 | rs1511802 | 0.51 | 0.050680687 | 0.3604 |
| hCV12066124 | rs2036914 | hCV8241632 | rs1511801 | 0.51 | 0.050680687 | 0.3736 |
| hCV12066124 | rs2036914 | hCV8241633 | rs1511800 | 0.51 | 0.050680687 | 0.0931 |
| hCV12066124 | rs2036914 | hDV71222711 | rs4253252 | 0.51 | 0.050680687 | 0.4015 |
| hCV1376266 | rs1654413 | hCV11977629 | rs1654459 | 0.51 | 0.544795666 | 0.7222 |
| hCV1376266 | rs1654413 | hCV1376257 | rs10416380 | 0.51 | 0.544795666 | 0.9433 |
| hCV1376266 | rs1654413 | hCV1376262 | rs1671150 | 0.51 | 0.544795666 | 1 |
| hCV1376266 | rs1654413 | hCV1376264 | rs1671151 | 0.51 | 0.544795666 | 1 |
| hCV1376266 | rs1654413 | hCV1376265 | rs1671152 | 0.51 | 0.544795666 | 0.8286 |
| hCV1376266 | rs1654413 | hCV1376342 | rs1654416 | 0.51 | 0.544795666 | 1 |
| hCV1376266 | rs1654413 | hCV1376359 | rs2886412 | 0.51 | 0.544795666 | 1 |
| hCV1376266 | rs1654413 | hCV15973734 | rs2304167 | 0.51 | 0.544795666 | 1 |
| hCV1376266 | rs1654413 | hCV16044361 | rs2569513 | 0.51 | 0.544795666 | 0.7222 |
| hCV1376266 | rs1654413 | hCV26895244 | rs1671153 | 0.51 | 0.544795666 | 1 |
| hCV1376266 | rs1654413 | hCV26895257 | rs2886415 | 0.51 | 0.544795666 | 1 |
| hCV1376266 | rs1654413 | hCV29271569 | rs1626971 | 0.51 | 0.544795666 | 0.7269 |
| hCV1376266 | rs1654413 | hCV31722831 | rs11671922 | 0.51 | 0.544795666 | 1 |
| hCV1376266 | rs1654413 | hCV31722832 | rs11084381 | 0.51 | 0.544795666 | 1 |
| hCV1376266 | rs1654413 | hCV31722834 | rs11084382 | 0.51 | 0.544795666 | 0.8448 |
| hCV1376266 | rs1654413 | hCV31722835 | rs11668169 | 0.51 | 0.544795666 | 1 |
| hCV1376266 | rs1654413 | hCV31722836 | rs11672026 | 0.51 | 0.544795666 | 1 |
| hCV1376266 | rs1654413 | hCV7841075 | rs1671196 | 0.51 | 0.544795666 | 1 |
| hCV1376266 | rs1654413 | hCV8703249 | rs1654444 | 0.51 | 0.544795666 | 0.7222 |
| hCV1376266 | rs1654413 | hCV8704962 | rs775893 | 0.51 | 0.544795666 | 0.5627 |
| hCV1376266 | rs1654413 | hCV8717752 | rs1671217 | 0.51 | 0.544795666 | 0.7269 |
| hCV1376266 | rs1654413 | hCV8717761 | rs1654439 | 0.51 | 0.544795666 | 0.675 |
| hCV1376266 | rs1654413 | hCV8717793 | rs1654433 | 0.51 | 0.544795666 | 0.7222 |
| hCV1376266 | rs1654413 | hCV8717794 | rs1654432 | 0.51 | 0.544795666 | 0.7222 |
| hCV1376266 | rs1654413 | hCV8717845 | rs892090 | 0.51 | 0.544795666 | 0.8292 |
| hCV1376266 | rs1654413 | hCV8717846 | rs892089 | 0.51 | 0.544795666 | 1 |
| hCV1376266 | rs1654413 | hCV8717871 | rs1654421 | 0.51 | 0.544795666 | 1 |
| hCV1376266 | rs1654413 | hCV8717873 | rs1613662 | 0.51 | 0.544795666 | 0.8292 |
| hCV1376266 | rs1654413 | hCV8717881 | rs1654420 | 0.51 | 0.544795666 | 1 |
| hCV1376266 | rs1654413 | hCV8717893 | rs1671192 | 0.51 | 0.544795666 | 1 |
| hCV1376266 | rs1654413 | hCV8718961 | rs1654451 | 0.51 | 0.544795666 | 0.7211 |
| hCV1376266 | rs1654413 | hCV8718972 | rs1654447 | 0.51 | 0.544795666 | 0.7222 |
| hCV1376266 | rs1654413 | hCV9490926 | rs1654419 | 0.51 | 0.544795666 | 1 |
| hCV1376342 | rs1654416 | hCV11977629 | rs1654459 | 0.51 | 0.409514099 | 0.5842 |
| hCV1376342 | rs1654416 | hCV1376257 | rs10416380 | 0.51 | 0.409514099 | 0.9457 |
| hCV1376342 | rs1654416 | hCV1376262 | rs1671150 | 0.51 | 0.409514099 | 0.9724 |
| hCV1376342 | rs1654416 | hCV1376264 | rs1671151 | 0.51 | 0.409514099 | 0.9724 |
| hCV1376342 | rs1654416 | hCV1376265 | rs1671152 | 0.51 | 0.409514099 | 0.7822 |
| hCV1376342 | rs1654416 | hCV1376266 | rs1654413 | 0.51 | 0.409514099 | 1 |
| hCV1376342 | rs1654416 | hCV1376359 | rs2886412 | 0.51 | 0.409514099 | 1 |
| hCV1376342 | rs1654416 | hCV15973734 | rs2304167 | 0.51 | 0.409514099 | 0.9724 |
| hCV1376342 | rs1654416 | hCV16044361 | rs2569513 | 0.51 | 0.409514099 | 0.6123 |
| hCV1376342 | rs1654416 | hCV26895244 | rs1671153 | 0.51 | 0.409514099 | 0.9724 |
| hCV1376342 | rs1654416 | hCV26895257 | rs2886415 | 0.51 | 0.409514099 | 1 |
| hCV1376342 | rs1654416 | hCV29271569 | rs1626971 | 0.51 | 0.409514099 | 0.7325 |
| hCV1376342 | rs1654416 | hCV31722831 | rs11671922 | 0.51 | 0.409514099 | 1 |
| hCV1376342 | rs1654416 | hCV31722832 | rs11084381 | 0.51 | 0.409514099 | 0.9207 |
| hCV1376342 | rs1654416 | hCV31722834 | rs11084382 | 0.51 | 0.409514099 | 0.8079 |
| hCV1376342 | rs1654416 | hCV31722835 | rs11668169 | 0.51 | 0.409514099 | 0.9205 |
| hCV1376342 | rs1654416 | hCV31722836 | rs11672026 | 0.51 | 0.409514099 | 0.9163 |
| hCV1376342 | rs1654416 | hCV7841075 | rs1671196 | 0.51 | 0.409514099 | 0.9207 |
| hCV1376342 | rs1654416 | hCV8703249 | rs1654444 | 0.51 | 0.409514099 | 0.633 |
| hCV1376342 | rs1654416 | hCV8704962 | rs775893 | 0.51 | 0.409514099 | 0.4637 |
| hCV1376342 | rs1654416 | hCV8717752 | rs1671217 | 0.51 | 0.409514099 | 0.7325 |
| hCV1376342 | rs1654416 | hCV8717761 | rs1654439 | 0.51 | 0.409514099 | 0.5468 |
| hCV1376342 | rs1654416 | hCV8717793 | rs1654433 | 0.51 | 0.409514099 | 0.6123 |
| hCV1376342 | rs1654416 | hCV8717794 | rs1654432 | 0.51 | 0.409514099 | 0.6123 |
| hCV1376342 | rs1654416 | hCV8717845 | rs892090 | 0.51 | 0.409514099 | 0.7313 |
| hCV1376342 | rs1654416 | hCV8717846 | rs892089 | 0.51 | 0.409514099 | 1 |
| hCV1376342 | rs1654416 | hCV8717871 | rs1654421 | 0.51 | 0.409514099 | 0.7784 |
| hCV1376342 | rs1654416 | hCV8717873 | rs1613662 | 0.51 | 0.409514099 | 0.7313 |
| hCV1376342 | rs1654416 | hCV8717881 | rs1654420 | 0.51 | 0.409514099 | 0.9205 |
| hCV1376342 | rs1654416 | hCV8717893 | rs1671192 | 0.51 | 0.409514099 | 1 |
| hCV1376342 | rs1654416 | hCV8718961 | rs1654451 | 0.51 | 0.409514099 | 0.5824 |
| hCV1376342 | rs1654416 | hCV8718972 | rs1654447 | 0.51 | 0.409514099 | 0.6338 |
| hCV1376342 | rs1654416 | hCV9490926 | rs1654419 | 0.51 | 0.409514099 | 0.9205 |
| hCV15793897 | rs3087505 | hCV11786203 | rs4253251 | 0.51 | 0.201010916 | 0.4643 |
| hCV15793897 | rs3087505 | hCV11786295 | rs4253421 | 0.51 | 0.201010916 | 0.6968 |
| hCV15793897 | rs3087505 | hCV12066116 | rs1877320 | 0.51 | 0.201010916 | 0.8216 |
| hCV15793897 | rs3087505 | hCV12066129 | rs1593 | 0.51 | 0.201010916 | 0.7273 |
| hCV15793897 | rs3087505 | hCV15811716 | rs2102575 | 0.51 | 0.201010916 | 0.9425 |
| hCV15793897 | rs3087505 | hCV15968026 | rs2292426 | 0.51 | 0.201010916 | 0.2078 |
| hCV15793897 | rs3087505 | hCV2103388 | rs4613610 | 0.51 | 0.201010916 | 0.4687 |
| hCV15793897 | rs3087505 | hCV22271609 | rs4253326 | 0.51 | 0.201010916 | 0.4122 |
| hCV15793897 | rs3087505 | hCV25634781 | rs4253299 | 0.51 | 0.201010916 | 0.4656 |
| hCV15793897 | rs3087505 | hCV25988221 | rs9995366 | 0.51 | 0.201010916 | 0.838 |
| hCV15793897 | rs3087505 | hCV26265197 | rs10014399 | 0.51 | 0.201010916 | 0.4643 |
| hCV15793897 | rs3087505 | hCV26265199 | rs2221843 | 0.51 | 0.201010916 | 0.4656 |
| hCV15793897 | rs3087505 | hCV27309991 | rs4572916 | 0.51 | 0.201010916 | 0.4643 |
| hCV15793897 | rs3087505 | hCV27506149 | rs3822055 | 0.51 | 0.201010916 | 0.4656 |
| hCV15793897 | rs3087505 | hCV27902803 | rs4862665 | 0.51 | 0.201010916 | 0.838 |
| hCV15793897 | rs3087505 | hCV29053261 | rs6842047 | 0.51 | 0.201010916 | 0.8875 |
| hCV15793897 | rs3087505 | hCV29053266 | rs7687961 | 0.51 | 0.201010916 | 0.4508 |
| hCV15793897 | rs3087505 | hCV29640635 | rs10029715 | 0.51 | 0.201010916 | 0.362 |
| hCV15793897 | rs3087505 | hCV29826351 | rs10025990 | 0.51 | 0.201010916 | 0.9133 |
| hCV15793897 | rs3087505 | hCV30307525 | rs10025152 | 0.51 | 0.201010916 | 0.362 |
| hCV15793897 | rs3087505 | hCV30492573 | rs10471184 | 0.51 | 0.201010916 | 0.8875 |
| hCV15793897 | rs3087505 | hCV30562347 | rs4253418 | 0.51 | 0.201010916 | 0.2672 |
| hCV15793897 | rs3087505 | hCV30983902 | rs4862668 | 0.51 | 0.201010916 | 0.8216 |
| hCV15793897 | rs3087505 | hCV30983927 | rs6552962 | 0.51 | 0.201010916 | 0.4909 |
| hCV15793897 | rs3087505 | hCV32209629 | rs12715865 | 0.51 | 0.201010916 | 0.4136 |
| hCV15793897 | rs3087505 | hCV32209635 | rs6848311 | 0.51 | 0.201010916 | 0.2855 |
| hCV15793897 | rs3087505 | hCV32291246 | rs4253403 | 0.51 | 0.201010916 | 0.2073 |
| hCV15793897 | rs3087505 | hCV3230000 | rs4253294 | 0.51 | 0.201010916 | 0.2753 |
| hCV15793897 | rs3087505 | hCV3230012 | rs4241821 | 0.51 | 0.201010916 | 0.4656 |
| hCV15793897 | rs3087505 | hCV3230014 | rs4861709 | 0.51 | 0.201010916 | 0.2753 |
| hCV15793897 | rs3087505 | hCV3230017 | rs4253327 | 0.51 | 0.201010916 | 0.2509 |
| hCV15793897 | rs3087505 | hCV3230018 | rs925453 | 0.51 | 0.201010916 | 0.2553 |
| hCV15793897 | rs3087505 | hCV3230019 | rs4253332 | 0.51 | 0.201010916 | 0.2614 |
| hCV15793897 | rs3087505 | hCV32313007 | rs4862666 | 0.51 | 0.201010916 | 0.838 |
| hCV15793897 | rs3087505 | hCV8241628 | rs907439 | 0.51 | 0.201010916 | 0.4643 |
| hCV15793897 | rs3087505 | hCV8241633 | rs1511800 | 0.51 | 0.201010916 | 0.838 |
| hCV15860433 | rs2070006 | hCV11503382 | rs1873369 | 0.51 | 0.09197249 | 0.2934 |
| hCV15860433 | rs2070006 | hCV11503414 | rs2066865 | 0.51 | 0.09197249 | 0.4534 |
| hCV15860433 | rs2070006 | hCV11503416 | rs2066864 | 0.51 | 0.09197249 | 0.506 |
| hCV15860433 | rs2070006 | hCV11503431 | rs2066861 | 0.51 | 0.09197249 | 0.446 |
| hCV15860433 | rs2070006 | hCV11503469 | rs2066854 | 0.51 | 0.09197249 | 0.5293 |
| hCV15860433 | rs2070006 | hCV11503470 | rs1800788 | 0.51 | 0.09197249 | 0.2862 |
| hCV15860433 | rs2070006 | hCV11852898 | rs6819508 | 0.51 | 0.09197249 | 0.1131 |
| hCV15860433 | rs2070006 | hCV11853387 | rs1490683 | 0.51 | 0.09197249 | 0.0995 |
| hCV15860433 | rs2070006 | hCV11853483 | rs12644950 | 0.51 | 0.09197249 | 0.4932 |
| hCV15860433 | rs2070006 | hCV11853489 | rs7681423 | 0.51 | 0.09197249 | 0.506 |
| hCV15860433 | rs2070006 | hCV11853496 | rs7654093 | 0.51 | 0.09197249 | 0.446 |
| hCV15860433 | rs2070006 | hCV21680 | rs7666020 | 0.51 | 0.09197249 | 0.1304 |
| hCV15860433 | rs2070006 | hCV21681 | rs6536018 | 0.51 | 0.09197249 | 0.1435 |
| hCV15860433 | rs2070006 | hCV22273499 | rs7668014 | 0.51 | 0.09197249 | 0.2505 |
| hCV15860433 | rs2070006 | hCV22274180 | rs11935584 | 0.51 | 0.09197249 | 0.2386 |
| hCV15860433 | rs2070006 | hCV2407354 | rs276166 | 0.51 | 0.09197249 | 0.1025 |
| hCV15860433 | rs2070006 | hCV24834 | rs4235247 | 0.51 | 0.09197249 | 0.2186 |
| hCV15860433 | rs2070006 | hCV25610762 | rs7668818 | 0.51 | 0.09197249 | 0.1508 |
| hCV15860433 | rs2070006 | hCV26019871 | rs4547780 | 0.51 | 0.09197249 | 0.174 |
| hCV15860433 | rs2070006 | hCV26024202 | rs11731813 | 0.51 | 0.09197249 | 0.2684 |
| hCV15860433 | rs2070006 | hCV27020269 | rs7659613 | 0.51 | 0.09197249 | 0.9639 |
| hCV15860433 | rs2070006 | hCV27020277 | rs6825454 | 0.51 | 0.09197249 | 0.4782 |
| hCV15860433 | rs2070006 | hCV27020280 | rs4463047 | 0.51 | 0.09197249 | 0.1824 |
| hCV15860433 | rs2070006 | hCV27313130 | rs4634202 | 0.51 | 0.09197249 | 0.443 |
| hCV15860433 | rs2070006 | hCV27313137 | rs12645631 | 0.51 | 0.09197249 | 0.1049 |
| hCV15860433 | rs2070006 | hCV27905214 | rs4323084 | 0.51 | 0.09197249 | 0.3386 |
| hCV15860433 | rs2070006 | hCV27907560 | rs4696576 | 0.51 | 0.09197249 | 0.1561 |
| hCV15860433 | rs2070006 | hCV27937396 | rs4634201 | 0.51 | 0.09197249 | 0.239 |
| hCV15860433 | rs2070006 | hCV2892859 | rs13130318 | 0.51 | 0.09197249 | 0.4434 |
| hCV15860433 | rs2070006 | hCV2892869 | rs13109457 | 0.51 | 0.09197249 | 0.5189 |
| hCV15860433 | rs2070006 | hCV2892870 | rs2070011 | 0.51 | 0.09197249 | 0.9612 |
| hCV15860433 | rs2070006 | hCV2892876 | rs2070018 | 0.51 | 0.09197249 | 0.2139 |
| hCV15860433 | rs2070006 | hCV2892877 | rs6050 | 0.51 | 0.09197249 | 0.4576 |
| hCV15860433 | rs2070006 | hCV2892878 | rs2070022 | 0.51 | 0.09197249 | 0.104 |
| hCV15860433 | rs2070006 | hCV2892893 | rs12648258 | 0.51 | 0.09197249 | 0.2624 |
| hCV15860433 | rs2070006 | hCV2892895 | rs12641958 | 0.51 | 0.09197249 | 0.2505 |
| hCV15860433 | rs2070006 | hCV2892896 | rs11940724 | 0.51 | 0.09197249 | 0.2505 |
| hCV15860433 | rs2070006 | hCV2892899 | rs7680155 | 0.51 | 0.09197249 | 0.2386 |
| hCV15860433 | rs2070006 | hCV2892905 | rs12642770 | 0.51 | 0.09197249 | 0.3701 |
| hCV15860433 | rs2070006 | hCV2892918 | rs12511469 | 0.51 | 0.09197249 | 0.2997 |
| hCV15860433 | rs2070006 | hCV2892926 | rs7662567 | 0.51 | 0.09197249 | 0.2596 |
| hCV15860433 | rs2070006 | hCV2892928 | rs13147579 | 0.51 | 0.09197249 | 0.2712 |
| hCV15860433 | rs2070006 | hCV28953838 | rs7690851 | 0.51 | 0.09197249 | 0.1824 |
| hCV15860433 | rs2070006 | hCV28953840 | rs6536017 | 0.51 | 0.09197249 | 0.1839 |
| hCV15860433 | rs2070006 | hCV28966638 | rs7676857 | 0.51 | 0.09197249 | 0.1018 |
| hCV15860433 | rs2070006 | hCV29420822 | rs4642230 | 0.51 | 0.09197249 | 0.2828 |
| hCV15860433 | rs2070006 | hCV29420827 | rs7654425 | 0.51 | 0.09197249 | 0.2505 |
| hCV15860433 | rs2070006 | hCV29420828 | rs7660120 | 0.51 | 0.09197249 | 0.2053 |
| hCV15860433 | rs2070006 | hCV29570696 | rs9997519 | 0.51 | 0.09197249 | 0.1033 |
| hCV15860433 | rs2070006 | hCV29582612 | rs4550901 | 0.51 | 0.09197249 | 0.2139 |
| hCV15860433 | rs2070006 | hCV29983641 | rs10008078 | 0.51 | 0.09197249 | 0.2893 |
| hCV15860433 | rs2070006 | hCV30285831 | rs10013914 | 0.51 | 0.09197249 | 0.1353 |
| hCV15860433 | rs2070006 | hCV30679170 | rs13148992 | 0.51 | 0.09197249 | 0.2746 |
| hCV15860433 | rs2070006 | hCV30711231 | rs12642469 | 0.51 | 0.09197249 | 0.2893 |
| hCV15860433 | rs2070006 | hCV31863979 | rs12186294 | 0.51 | 0.09197249 | 0.5331 |
| hCV15860433 | rs2070006 | hCV31863982 | rs7659024 | 0.51 | 0.09197249 | 0.446 |
| hCV15860433 | rs2070006 | hCV31863989 | rs4308349 | 0.51 | 0.09197249 | 0.2709 |
| hCV15860433 | rs2070006 | hCV31863993 | rs7673587 | 0.51 | 0.09197249 | 0.2386 |
| hCV15860433 | rs2070006 | hCV32212659 | rs4622984 | 0.51 | 0.09197249 | 0.385 |
| hCV15860433 | rs2070006 | hCV32212662 | rs11099958 | 0.51 | 0.09197249 | 0.1092 |
| hCV15860433 | rs2070006 | hCV32212663 | rs7670827 | 0.51 | 0.09197249 | 0.1457 |
| hCV15860433 | rs2070006 | hCV32212669 | rs12649647 | 0.51 | 0.09197249 | 0.1198 |
| hCV15860433 | rs2070006 | hCV354895 | rs11737226 | 0.51 | 0.09197249 | 0.2725 |
| hCV15860433 | rs2070006 | hCV354896 | rs7690972 | 0.51 | 0.09197249 | 0.2725 |
| hCV15860433 | rs2070006 | hCV36809 | rs10517590 | 0.51 | 0.09197249 | 0.1026 |
| hCV15860433 | rs2070006 | hCV426173 | rs12504201 | 0.51 | 0.09197249 | 0.1421 |
| hCV15860433 | rs2070006 | hCV470979 | rs1490672 | 0.51 | 0.09197249 | 0.2591 |
| hCV15860433 | rs2070006 | hCV7428370 | rs1456450 | 0.51 | 0.09197249 | 0.1012 |
| hCV15860433 | rs2070006 | hCV7429780 | rs1800792 | 0.51 | 0.09197249 | 0.5074 |
| hCV15860433 | rs2070006 | hCV7429783 | rs1044291 | 0.51 | 0.09197249 | 0.2505 |
| hCV15860433 | rs2070006 | hCV7429793 | rs1025154 | 0.51 | 0.09197249 | 0.2893 |
| hCV15860433 | rs2070006 | hCV9317206 | rs2070008 | 0.51 | 0.09197249 | 0.252 |
| hCV15860433 | rs2070006 | hDV70945235 | rs17373860 | 0.51 | 0.09197249 | 0.1588 |
| hCV15860433 | rs2070006 | hDV72277158 | rs28673871 | 0.51 | 0.09197249 | 0.1082 |
| hCV15860433 | rs2070006 | hDV77232287 | rs7666918 | 0.51 | 0.09197249 | 0.2505 |
| hCV15949414 | rs2234628 | hCV11327199 | rs12637760 | 0.51 | 0.263389785 | 1 |
| hCV15949414 | rs2234628 | hCV15961938 | rs2284816 | 0.51 | 0.263389785 | 1 |
| hCV15949414 | rs2234628 | hCV16189344 | rs2298422 | 0.51 | 0.263389785 | 0.8478 |
| hCV15949414 | rs2234628 | hCV1845321 | rs12636358 | 0.51 | 0.263389785 | 1 |
| hCV15949414 | rs2234628 | hCV27512998 | rs3762790 | 0.51 | 0.263389785 | 1 |
| hCV15949414 | rs2234628 | hCV30700451 | rs12631864 | 0.51 | 0.263389785 | 1 |
| hCV15949414 | rs2234628 | hCV30700457 | rs12635900 | 0.51 | 0.263389785 | 0.9045 |
| hCV15949414 | rs2234628 | hCV3083980 | rs12637034 | 0.51 | 0.263389785 | 1 |
| hCV15949414 | rs2234628 | hCV32001449 | rs12636077 | 0.51 | 0.263389785 | 1 |
| hCV15949414 | rs2234628 | hDV70822211 | rs17037809 | 0.51 | 0.263389785 | 1 |
| hCV15949414 | rs2234628 | hDV70822215 | rs17037814 | 0.51 | 0.263389785 | 1 |
| hCV15949414 | rs2234628 | hDV70822219 | rs17037819 | 0.51 | 0.263389785 | 1 |
| hCV15949414 | rs2234628 | hDV71601922 | rs17037775 | 0.51 | 0.263389785 | 1 |
| hCV15949414 | rs2234628 | hDV76880100 | rs3749388 | 0.51 | 0.263389785 | 1 |
| hCV15968043 | rs2292423 | hCV11786147 | rs4862662 | 0.51 | 0.095896459 | 0.6131 |
| hCV15968043 | rs2292423 | hCV11786203 | rs4253251 | 0.51 | 0.095896459 | 0.1841 |
| hCV15968043 | rs2292423 | hCV11786235 | rs4253287 | 0.51 | 0.095896459 | 0.1251 |
| hCV15968043 | rs2292423 | hCV11786258 | rs4253303 | 0.51 | 0.095896459 | 0.8913 |
| hCV15968043 | rs2292423 | hCV11786259 | rs4253304 | 0.51 | 0.095896459 | 1 |
| hCV15968043 | rs2292423 | hCV11786327 | rs13133050 | 0.51 | 0.095896459 | 0.1279 |
| hCV15968043 | rs2292423 | hCV12066118 | rs2048 | 0.51 | 0.095896459 | 0.6531 |
| hCV15968043 | rs2292423 | hCV12066119 | rs1912826 | 0.51 | 0.095896459 | 0.594 |
| hCV15968043 | rs2292423 | hCV12066124 | rs2036914 | 0.51 | 0.095896459 | 0.3742 |
| hCV15968043 | rs2292423 | hCV1474481 | rs7693361 | 0.51 | 0.095896459 | 0.1013 |
| hCV15968043 | rs2292423 | hCV15968025 | rs2292425 | 0.51 | 0.095896459 | 0.2221 |
| hCV15968043 | rs2292423 | hCV15968026 | rs2292426 | 0.51 | 0.095896459 | 0.3124 |
| hCV15968043 | rs2292423 | hCV15968034 | rs2292428 | 0.51 | 0.095896459 | 0.3976 |
| hCV15968043 | rs2292423 | hCV15975109 | rs2304596 | 0.51 | 0.095896459 | 0.1471 |
| hCV15968043 | rs2292423 | hCV2103343 | rs4241824 | 0.51 | 0.095896459 | 0.3048 |
| hCV15968043 | rs2292423 | hCV2103391 | rs1008728 | 0.51 | 0.095896459 | 0.2022 |
| hCV15968043 | rs2292423 | hCV2103392 | rs12500826 | 0.51 | 0.095896459 | 0.179 |
| hCV15968043 | rs2292423 | hCV2103401 | rs7687352 | 0.51 | 0.095896459 | 0.1006 |
| hCV15968043 | rs2292423 | hCV2103402 | rs9993749 | 0.51 | 0.095896459 | 0.1071 |
| hCV15968043 | rs2292423 | hCV22271609 | rs4253326 | 0.51 | 0.095896459 | 0.1576 |
| hCV15968043 | rs2292423 | hCV22272267 | rs3733402 | 0.51 | 0.095896459 | 0.6588 |
| hCV15968043 | rs2292423 | hCV25474413 | rs3822057 | 0.51 | 0.095896459 | 0.313 |
| hCV15968043 | rs2292423 | hCV25474414 | rs4253399 | 0.51 | 0.095896459 | 0.338 |
| hCV15968043 | rs2292423 | hCV25634781 | rs4253299 | 0.51 | 0.095896459 | 0.179 |
| hCV15968043 | rs2292423 | hCV25989001 | hCV25989001 | 0.51 | 0.095896459 | 0.156 |
| hCV15968043 | rs2292423 | hCV25990131 | rs13146272 | 0.51 | 0.095896459 | 0.2261 |
| hCV15968043 | rs2292423 | hCV26038139 | rs4253405 | 0.51 | 0.095896459 | 0.1127 |
| hCV15968043 | rs2292423 | hCV26265197 | rs10014399 | 0.51 | 0.095896459 | 0.1871 |
| hCV15968043 | rs2292423 | hCV26265199 | rs2221843 | 0.51 | 0.095896459 | 0.179 |
| hCV15968043 | rs2292423 | hCV26265231 | rs7684025 | 0.51 | 0.095896459 | 0.6916 |
| hCV15968043 | rs2292423 | hCV27309991 | rs4572916 | 0.51 | 0.095896459 | 0.1062 |
| hCV15968043 | rs2292423 | hCV27474895 | rs3756011 | 0.51 | 0.095896459 | 0.1967 |
| hCV15968043 | rs2292423 | hCV27477533 | rs3756008 | 0.51 | 0.095896459 | 0.3624 |
| hCV15968043 | rs2292423 | hCV27482765 | rs3775301 | 0.51 | 0.095896459 | 0.1471 |
| hCV15968043 | rs2292423 | hCV27506149 | rs3822055 | 0.51 | 0.095896459 | 0.179 |
| hCV15968043 | rs2292423 | hCV27902808 | rs4253236 | 0.51 | 0.095896459 | 0.4376 |
| hCV15968043 | rs2292423 | hCV28960679 | rs6844764 | 0.51 | 0.095896459 | 0.2857 |
| hCV15968043 | rs2292423 | hCV29053260 | rs4861707 | 0.51 | 0.095896459 | 0.1391 |
| hCV15968043 | rs2292423 | hCV29053264 | rs7667777 | 0.51 | 0.095896459 | 0.6735 |
| hCV15968043 | rs2292423 | hCV29053265 | rs4253244 | 0.51 | 0.095896459 | 0.4158 |
| hCV15968043 | rs2292423 | hCV29640635 | rs10029715 | 0.51 | 0.095896459 | 0.1031 |
| hCV15968043 | rs2292423 | hCV29718000 | rs4253238 | 0.51 | 0.095896459 | 0.6615 |
| hCV15968043 | rs2292423 | hCV29826351 | rs10025990 | 0.51 | 0.095896459 | 0.0963 |
| hCV15968043 | rs2292423 | hCV29877725 | rs4253295 | 0.51 | 0.095896459 | 0.8892 |
| hCV15968043 | rs2292423 | hCV30307525 | rs10025152 | 0.51 | 0.095896459 | 0.1031 |
| hCV15968043 | rs2292423 | hCV32209636 | rs11132387 | 0.51 | 0.095896459 | 0.2244 |
| hCV15968043 | rs2292423 | hCV32209638 | rs12507040 | 0.51 | 0.095896459 | 0.108 |
| hCV15968043 | rs2292423 | hCV32291217 | rs4253323 | 0.51 | 0.095896459 | 0.1471 |
| hCV15968043 | rs2292423 | hCV32291269 | rs4253417 | 0.51 | 0.095896459 | 0.2504 |
| hCV15968043 | rs2292423 | hCV32291286 | rs4253422 | 0.51 | 0.095896459 | 0.0995 |
| hCV15968043 | rs2292423 | hCV32291287 | rs4253423 | 0.51 | 0.095896459 | 0.0995 |
| hCV15968043 | rs2292423 | hCV32291295 | rs4253292 | 0.51 | 0.095896459 | 0.1503 |
| hCV15968043 | rs2292423 | hCV32291301 | rs4253302 | 0.51 | 0.095896459 | 0.1455 |
| hCV15968043 | rs2292423 | hCV32295028 | rs4253260 | 0.51 | 0.095896459 | 0.1471 |
| hCV15968043 | rs2292423 | hCV3229991 | rs4241815 | 0.51 | 0.095896459 | 0.6588 |
| hCV15968043 | rs2292423 | hCV3229992 | rs3775298 | 0.51 | 0.095896459 | 0.6588 |
| hCV15968043 | rs2292423 | hCV3229995 | rs11132382 | 0.51 | 0.095896459 | 0.6615 |
| hCV15968043 | rs2292423 | hCV3230000 | rs4253294 | 0.51 | 0.095896459 | 0.3176 |
| hCV15968043 | rs2292423 | hCV3230002 | rs4253297 | 0.51 | 0.095896459 | 0.8979 |
| hCV15968043 | rs2292423 | hCV3230003 | rs2304595 | 0.51 | 0.095896459 | 1 |
| hCV15968043 | rs2292423 | hCV3230006 | rs4253308 | 0.51 | 0.095896459 | 0.8892 |
| hCV15968043 | rs2292423 | hCV3230007 | rs4253311 | 0.51 | 0.095896459 | 0.6588 |
| hCV15968043 | rs2292423 | hCV3230011 | rs4253320 | 0.51 | 0.095896459 | 0.8979 |
| hCV15968043 | rs2292423 | hCV3230012 | rs4241821 | 0.51 | 0.095896459 | 0.179 |
| hCV15968043 | rs2292423 | hCV3230013 | rs3775303 | 0.51 | 0.095896459 | 1 |
| hCV15968043 | rs2292423 | hCV3230014 | rs4861709 | 0.51 | 0.095896459 | 0.3176 |
| hCV15968043 | rs2292423 | hCV3230017 | rs4253327 | 0.51 | 0.095896459 | 0.3086 |
| hCV15968043 | rs2292423 | hCV3230018 | rs925453 | 0.51 | 0.095896459 | 0.304 |
| hCV15968043 | rs2292423 | hCV3230019 | rs4253332 | 0.51 | 0.095896459 | 0.304 |
| hCV15968043 | rs2292423 | hCV3230021 | rs13135645 | 0.51 | 0.095896459 | 0.1067 |
| hCV15968043 | rs2292423 | hCV3230022 | rs11132383 | 0.51 | 0.095896459 | 0.2177 |
| hCV15968043 | rs2292423 | hCV3230025 | rs3756009 | 0.51 | 0.095896459 | 0.3012 |
| hCV15968043 | rs2292423 | hCV3230031 | rs4253419 | 0.51 | 0.095896459 | 0.0995 |
| hCV15968043 | rs2292423 | hCV3230038 | rs2289252 | 0.51 | 0.095896459 | 0.2462 |
| hCV15968043 | rs2292423 | hCV3230083 | rs10013653 | 0.51 | 0.095896459 | 0.5543 |
| hCV15968043 | rs2292423 | hCV3230084 | rs7682918 | 0.51 | 0.095896459 | 0.5227 |
| hCV15968043 | rs2292423 | hCV3230094 | rs7687818 | 0.51 | 0.095896459 | 0.7508 |
| hCV15968043 | rs2292423 | hCV3230096 | rs3817184 | 0.51 | 0.095896459 | 0.6453 |
| hCV15968043 | rs2292423 | hCV3230097 | rs3736455 | 0.51 | 0.095896459 | 0.3107 |
| hCV15968043 | rs2292423 | hCV3230101 | rs6835839 | 0.51 | 0.095896459 | 0.4126 |
| hCV15968043 | rs2292423 | hCV3230106 | rs1473597 | 0.51 | 0.095896459 | 0.4173 |
| hCV15968043 | rs2292423 | hCV3230110 | rs2276917 | 0.51 | 0.095896459 | 0.3976 |
| hCV15968043 | rs2292423 | hCV3230113 | rs1053094 | 0.51 | 0.095896459 | 0.59 |
| hCV15968043 | rs2292423 | hCV3230118 | rs4253429 | 0.51 | 0.095896459 | 0.0995 |
| hCV15968043 | rs2292423 | hCV3230125 | rs11938564 | 0.51 | 0.095896459 | 0.163 |
| hCV15968043 | rs2292423 | hCV3230131 | rs13136269 | 0.51 | 0.095896459 | 0.108 |
| hCV15968043 | rs2292423 | hCV3230133 | rs12511874 | 0.51 | 0.095896459 | 0.108 |
| hCV15968043 | rs2292423 | hCV3230134 | rs12500151 | 0.51 | 0.095896459 | 0.108 |
| hCV15968043 | rs2292423 | hCV3230136 | rs13116273 | 0.51 | 0.095896459 | 0.129 |
| hCV15968043 | rs2292423 | hCV32313006 | rs4253248 | 0.51 | 0.095896459 | 0.6615 |
| hCV15968043 | rs2292423 | hCV32313024 | rs4253239 | 0.51 | 0.095896459 | 0.1503 |
| hCV15968043 | rs2292423 | hCV32358975 | rs4253255 | 0.51 | 0.095896459 | 0.6531 |
| hCV15968043 | rs2292423 | hCV32358984 | rs4253256 | 0.51 | 0.095896459 | 0.4314 |
| hCV15968043 | rs2292423 | hCV8241628 | rs907439 | 0.51 | 0.095896459 | 0.1062 |
| hCV15968043 | rs2292423 | hCV8241630 | rs925451 | 0.51 | 0.095896459 | 0.338 |
| hCV15968043 | rs2292423 | hCV8241631 | rs1511802 | 0.51 | 0.095896459 | 0.8892 |
| hCV15968043 | rs2292423 | hCV8241632 | rs1511801 | 0.51 | 0.095896459 | 0.6519 |
| hCV15968043 | rs2292423 | hDV71222711 | rs4253252 | 0.51 | 0.095896459 | 0.6615 |
| hCV15968043 | rs2292423 | hDV76175111 | rs35079309 | 0.51 | 0.095896459 | 0.1621 |
| hCV15990789 | rs2355466 | hCV25743768 | rs4757548 | 0.51 | 0.951959625 | 0.9603 |
| hCV16177220 | rs2266911 | hCV2451164 | rs2357252 | 0.51 | 0.395362464 | 0.7006 |
| hCV16177220 | rs2266911 | hCV2451180 | rs2072886 | 0.51 | 0.395362464 | 0.4412 |
| hCV16177220 | rs2266911 | hCV29241293 | rs7061257 | 0.51 | 0.395362464 | 0.7143 |
| hCV16177220 | rs2266911 | hCV32361087 | rs4825898 | 0.51 | 0.395362464 | 0.893 |
| hCV16180170 | rs2227589 | hCV11342529 | rs1951627 | 0.51 | 0.229511448 | 0.3108 |
| hCV16180170 | rs2227589 | hCV11975630 | rs2065170 | 0.51 | 0.229511448 | 1 |
| hCV16180170 | rs2227589 | hCV15864094 | rs2068871 | 0.51 | 0.229511448 | 0.9425 |
| hCV16180170 | rs2227589 | hCV15956059 | rs2227592 | 0.51 | 0.229511448 | 1 |
| hCV16180170 | rs2227589 | hCV16135173 | rs2146372 | 0.51 | 0.229511448 | 1 |
| hCV16180170 | rs2227589 | hCV16290208 | rs2759328 | 0.51 | 0.229511448 | 1 |
| hCV16180170 | rs2227589 | hCV1681325 | rs898657 | 0.51 | 0.229511448 | 0.288 |
| hCV16180170 | rs2227589 | hCV1681328 | rs10912647 | 0.51 | 0.229511448 | 0.2457 |
| hCV16180170 | rs2227589 | hCV25600635 | rs7539322 | 0.51 | 0.229511448 | 0.8856 |
| hCV16180170 | rs2227589 | hCV25932979 | rs16846809 | 0.51 | 0.229511448 | 0.5549 |
| hCV16180170 | rs2227589 | hCV27483572 | rs3791022 | 0.51 | 0.229511448 | 1 |
| hCV16180170 | rs2227589 | hCV28998001 | rs6425251 | 0.51 | 0.229511448 | 0.2457 |
| hCV16180170 | rs2227589 | hCV29517287 | rs2901747 | 0.51 | 0.229511448 | 0.2436 |
| hCV16180170 | rs2227589 | hCV29989899 | rs6685043 | 0.51 | 0.229511448 | 0.6095 |
| hCV16180170 | rs2227589 | hCV30205817 | rs10489254 | 0.51 | 0.229511448 | 0.5549 |
| hCV16180170 | rs2227589 | hCV30404194 | rs6691053 | 0.51 | 0.229511448 | 0.3572 |
| hCV16180170 | rs2227589 | hCV30472885 | rs7520441 | 0.51 | 0.229511448 | 0.315 |
| hCV16180170 | rs2227589 | hCV30804119 | rs10912651 | 0.51 | 0.229511448 | 0.2376 |
| hCV16180170 | rs2227589 | hCV30804135 | rs12078293 | 0.51 | 0.229511448 | 0.2457 |
| hCV16180170 | rs2227589 | hCV30804139 | rs12089930 | 0.51 | 0.229511448 | 0.245 |
| hCV16180170 | rs2227589 | hCV8911729 | rs941987 | 0.51 | 0.229511448 | 0.8292 |
| hCV16180170 | rs2227589 | hCV8911768 | rs941988 | 0.51 | 0.229511448 | 1 |
| hCV16180170 | rs2227589 | hCV9575253 | rs1031751 | 0.51 | 0.229511448 | 0.3146 |
| hCV16180170 | rs2227589 | hCV9575263 | rs898658 | 0.51 | 0.229511448 | 0.2457 |
| hCV16180170 | rs2227589 | hDV70683090 | rs16846433 | 0.51 | 0.229511448 | 0.9425 |
| hCV16180170 | rs2227589 | hDV70683162 | rs16846526 | 0.51 | 0.229511448 | 1 |
| hCV16180170 | rs2227589 | hDV70683177 | rs16846546 | 0.51 | 0.229511448 | 1 |
| hCV16180170 | rs2227589 | hDV70683187 | rs16846561 | 0.51 | 0.229511448 | 1 |
| hCV16180170 | rs2227589 | hDV70683212 | rs16846593 | 0.51 | 0.229511448 | 0.5549 |
| hCV16180170 | rs2227589 | hDV70683382 | rs16846815 | 0.51 | 0.229511448 | 0.5078 |
| hCV16180170 | rs2227589 | hDV70934851 | rs17301125 | 0.51 | 0.229511448 | 0.2534 |
| hCV16182835 | rs2274736 | hCV11295871 | rs17203789 | 0.51 | 0.445188644 | 0.6809 |
| hCV16182835 | rs2274736 | hCV11295918 | rs12586348 | 0.51 | 0.445188644 | 0.6574 |
| hCV16182835 | rs2274736 | hCV11454301 | rs11159868 | 0.51 | 0.445188644 | 0.6481 |
| hCV16182835 | rs2274736 | hCV11454302 | rs7157149 | 0.51 | 0.445188644 | 0.6481 |
| hCV16182835 | rs2274736 | hCV11474667 | rs10150311 | 0.51 | 0.445188644 | 0.9163 |
| hCV16182835 | rs2274736 | hCV11474668 | rs10138002 | 0.51 | 0.445188644 | 0.9163 |
| hCV16182835 | rs2274736 | hCV11474679 | rs2778936 | 0.51 | 0.445188644 | 0.9591 |
| hCV16182835 | rs2274736 | hCV11657898 | rs1956406 | 0.51 | 0.445188644 | 0.5421 |
| hCV16182835 | rs2274736 | hCV11657912 | rs1950806 | 0.51 | 0.445188644 | 0.6481 |
| hCV16182835 | rs2274736 | hCV11666712 | rs1864747 | 0.51 | 0.445188644 | 0.919 |
| hCV16182835 | rs2274736 | hCV11666713 | rs1864746 | 0.51 | 0.445188644 | 0.919 |
| hCV16182835 | rs2274736 | hCV11666722 | rs1864748 | 0.51 | 0.445188644 | 0.6812 |
| hCV16182835 | rs2274736 | hCV11666724 | rs1864744 | 0.51 | 0.445188644 | 1 |
| hCV16182835 | rs2274736 | hCV11666737 | rs1955600 | 0.51 | 0.445188644 | 0.6562 |
| hCV16182835 | rs2274736 | hCV1262727 | rs12587200 | 0.51 | 0.445188644 | 0.6574 |
| hCV16182835 | rs2274736 | hCV1262753 | rs12436982 | 0.51 | 0.445188644 | 0.6322 |
| hCV16182835 | rs2274736 | hCV15870067 | rs2224333 | 0.51 | 0.445188644 | 0.6651 |
| hCV16182835 | rs2274736 | hCV16185886 | rs2297129 | 0.51 | 0.445188644 | 1 |
| hCV16182835 | rs2274736 | hCV16189259 | rs2295135 | 0.51 | 0.445188644 | 0.6601 |
| hCV16182835 | rs2274736 | hCV211940 | rs12587386 | 0.51 | 0.445188644 | 0.6583 |
| hCV16182835 | rs2274736 | hCV2231821 | rs453112 | 0.51 | 0.445188644 | 0.9596 |
| hCV16182835 | rs2274736 | hCV2485030 | rs12589467 | 0.51 | 0.445188644 | 0.6583 |
| hCV16182835 | rs2274736 | hCV2485038 | rs865285 | 0.51 | 0.445188644 | 0.8835 |
| hCV16182835 | rs2274736 | hCV2485039 | rs3179969 | 0.51 | 0.445188644 | 0.9793 |
| hCV16182835 | rs2274736 | hCV25933483 | rs10143744 | 0.51 | 0.445188644 | 0.879 |
| hCV16182835 | rs2274736 | hCV25935678 | rs4904452 | 0.51 | 0.445188644 | 0.9573 |
| hCV16182835 | rs2274736 | hCV25942539 | rs2401751 | 0.51 | 0.445188644 | 1 |
| hCV16182835 | rs2274736 | hCV27202496 | rs1099698 | 0.51 | 0.445188644 | 0.9558 |
| hCV16182835 | rs2274736 | hCV27202497 | rs12589480 | 0.51 | 0.445188644 | 0.6692 |
| hCV16182835 | rs2274736 | hCV27202543 | rs7146241 | 0.51 | 0.445188644 | 0.9591 |
| hCV16182835 | rs2274736 | hCV27202682 | rs10142228 | 0.51 | 0.445188644 | 0.4551 |
| hCV16182835 | rs2274736 | hCV27520559 | rs3814855 | 0.51 | 0.445188644 | 0.6697 |
| hCV16182835 | rs2274736 | hCV2796701 | rs9323834 | 0.51 | 0.445188644 | 0.4697 |
| hCV16182835 | rs2274736 | hCV2796704 | rs10134036 | 0.51 | 0.445188644 | 0.4645 |
| hCV16182835 | rs2274736 | hCV2796706 | rs9671813 | 0.51 | 0.445188644 | 0.4777 |
| hCV16182835 | rs2274736 | hCV29385782 | rs7141608 | 0.51 | 0.445188644 | 0.9591 |
| hCV16182835 | rs2274736 | hCV29385806 | rs8020072 | 0.51 | 0.445188644 | 0.6704 |
| hCV16182835 | rs2274736 | hCV29549024 | rs10137225 | 0.51 | 0.445188644 | 0.4489 |
| hCV16182835 | rs2274736 | hCV29567112 | rs10484010 | 0.51 | 0.445188644 | 0.4622 |
| hCV16182835 | rs2274736 | hCV29729918 | rs10143767 | 0.51 | 0.445188644 | 0.6878 |
| hCV16182835 | rs2274736 | hCV29910416 | rs10139817 | 0.51 | 0.445188644 | 0.4677 |
| hCV16182835 | rs2274736 | hCV30414828 | rs7144432 | 0.51 | 0.445188644 | 0.9596 |
| hCV16182835 | rs2274736 | hCV30414829 | rs10134008 | 0.51 | 0.445188644 | 0.6988 |
| hCV16182835 | rs2274736 | hCV30468559 | rs10132509 | 0.51 | 0.445188644 | 0.496 |
| hCV16182835 | rs2274736 | hCV32095372 | rs12586714 | 0.51 | 0.445188644 | 0.881 |
| hCV16182835 | rs2274736 | hCV32095396 | rs11845147 | 0.51 | 0.445188644 | 0.919 |
| hCV16182835 | rs2274736 | hCV32095401 | rs11847417 | 0.51 | 0.445188644 | 0.9163 |
| hCV16182835 | rs2274736 | hCV32095402 | rs11159857 | 0.51 | 0.445188644 | 0.919 |
| hCV16182835 | rs2274736 | hCV32095403 | rs4390529 | 0.51 | 0.445188644 | 0.917 |
| hCV16182835 | rs2274736 | hCV32095404 | rs4301952 | 0.51 | 0.445188644 | 0.919 |
| hCV16182835 | rs2274736 | hCV32095415 | rs12050316 | 0.51 | 0.445188644 | 0.8616 |
| hCV16182835 | rs2274736 | hCV32095422 | rs2033418 | 0.51 | 0.445188644 | 0.9135 |
| hCV16182835 | rs2274736 | hCV32095429 | rs12436642 | 0.51 | 0.445188644 | 0.9381 |
| hCV16182835 | rs2274736 | hCV32095430 | rs11159859 | 0.51 | 0.445188644 | 0.8539 |
| hCV16182835 | rs2274736 | hCV32095431 | rs11629164 | 0.51 | 0.445188644 | 0.8395 |
| hCV16182835 | rs2274736 | hCV32095460 | rs12434935 | 0.51 | 0.445188644 | 0.6651 |
| hCV16182835 | rs2274736 | hCV32095525 | rs12590826 | 0.51 | 0.445188644 | 0.6121 |
| hCV16182835 | rs2274736 | hCV32095533 | rs12588535 | 0.51 | 0.445188644 | 0.6651 |
| hCV16182835 | rs2274736 | hCV3211521 | rs12431548 | 0.51 | 0.445188644 | 0.6512 |
| hCV16182835 | rs2274736 | hCV3211539 | rs1998670 | 0.51 | 0.445188644 | 0.6891 |
| hCV16182835 | rs2274736 | hCV3211540 | rs2274735 | 0.51 | 0.445188644 | 0.9793 |
| hCV16182835 | rs2274736 | hCV3211544 | rs9323830 | 0.51 | 0.445188644 | 0.919 |
| hCV16182835 | rs2274736 | hCV3211545 | rs7160647 | 0.51 | 0.445188644 | 0.9163 |
| hCV16182835 | rs2274736 | hCV3211546 | rs7143642 | 0.51 | 0.445188644 | 0.919 |
| hCV16182835 | rs2274736 | hCV3211548 | rs7151164 | 0.51 | 0.445188644 | 0.919 |
| hCV16182835 | rs2274736 | hCV3211549 | rs12433026 | 0.51 | 0.445188644 | 0.8973 |
| hCV16182835 | rs2274736 | hCV3211559 | rs2004329 | 0.51 | 0.445188644 | 0.6919 |
| hCV16182835 | rs2274736 | hCV3211560 | rs12436326 | 0.51 | 0.445188644 | 0.6988 |
| hCV16182835 | rs2274736 | hCV3211561 | rs8017811 | 0.51 | 0.445188644 | 0.9581 |
| hCV16182835 | rs2274736 | hCV3211562 | rs4904454 | 0.51 | 0.445188644 | 0.9596 |
| hCV16182835 | rs2274736 | hCV3211566 | rs930181 | 0.51 | 0.445188644 | 0.9591 |
| hCV16182835 | rs2274736 | hCV3211568 | rs816075 | 0.51 | 0.445188644 | 1 |
| hCV16182835 | rs2274736 | hCV342703 | rs12433464 | 0.51 | 0.445188644 | 0.6601 |
| hCV16182835 | rs2274736 | hCV342704 | rs1955598 | 0.51 | 0.445188644 | 0.7953 |
| hCV16182835 | rs2274736 | hCV7583060 | rs1028455 | 0.51 | 0.445188644 | 0.8774 |
| hCV16182835 | rs2274736 | hCV7583094 | rs1048190 | 0.51 | 0.445188644 | 0.6083 |
| hCV16182835 | rs2274736 | hCV9595812 | rs845758 | 0.51 | 0.445188644 | 0.822 |
| hCV16182835 | rs2274736 | hCV9595827 | rs845757 | 0.51 | 0.445188644 | 0.9591 |
| hCV16182835 | rs2274736 | hCV9595840 | rs816072 | 0.51 | 0.445188644 | 1 |
| hCV16182835 | rs2274736 | hCV9595849 | rs1152376 | 0.51 | 0.445188644 | 0.9793 |
| hCV16182835 | rs2274736 | hCV9595856 | rs816069 | 0.51 | 0.445188644 | 0.9586 |
| hCV16182835 | rs2274736 | hCV9595863 | rs1344747 | 0.51 | 0.445188644 | 0.9596 |
| hCV16182835 | rs2274736 | hCV9595868 | rs891750 | 0.51 | 0.445188644 | 0.6812 |
| hCV16182835 | rs2274736 | hCV9595869 | rs891749 | 0.51 | 0.445188644 | 0.6812 |
| hCV16182835 | rs2274736 | hCV9595897 | rs1287825 | 0.51 | 0.445188644 | 0.4565 |
| hCV16182835 | rs2274736 | hDV70886228 | rs17124652 | 0.51 | 0.445188644 | 0.6583 |
| hCV16182835 | rs2274736 | hDV70886264 | rs17124700 | 0.51 | 0.445188644 | 0.6583 |
| hCV16182835 | rs2274736 | hDV70918505 | rs17188228 | 0.51 | 0.445188644 | 0.6141 |
| hCV16182835 | rs2274736 | hDV70929207 | rs17260380 | 0.51 | 0.445188644 | 0.6481 |
| hCV16182835 | rs2274736 | hDV70929214 | rs17260415 | 0.51 | 0.445188644 | 0.6571 |
| hCV16182835 | rs2274736 | hDV70991668 | rs17698817 | 0.51 | 0.445188644 | 0.6223 |
| hCV16182835 | rs2274736 | hDV70991980 | rs17700521 | 0.51 | 0.445188644 | 0.5853 |
| hCV16182835 | rs2274736 | hDV71004484 | rs17772064 | 0.51 | 0.445188644 | 0.6697 |
| hCV16182835 | rs2274736 | hDV71004511 | rs17772222 | 0.51 | 0.445188644 | 0.6697 |
| hCV16182835 | rs2274736 | hDV71004521 | rs17772288 | 0.51 | 0.445188644 | 0.65 |
| hCV16182835 | rs2274736 | hDV71008979 | rs17798341 | 0.51 | 0.445188644 | 0.6988 |
| hCV16182835 | rs2274736 | hDV71605687 | rs17188046 | 0.51 | 0.445188644 | 0.6571 |
| hCV16182835 | rs2274736 | hDV77012938 | rs4514599 | 0.51 | 0.445188644 | 0.8712 |
| hCV16182835 | rs2274736 | hDV77027209 | rs4635267 | 0.51 | 0.445188644 | 0.6646 |
| hCV16182835 | rs2274736 | hDV77248933 | rs8021690 | 0.51 | 0.445188644 | 0.6481 |
| hCV1825046 | rs2069952 | hCV1064756 | rs734111 | 0.51 | 0.131481735 | 0.5093 |
| hCV1825046 | rs2069952 | hCV11189130 | rs2065979 | 0.51 | 0.131481735 | 1 |
| hCV1825046 | rs2069952 | hCV11189159 | rs6060270 | 0.51 | 0.131481735 | 0.2033 |
| hCV1825046 | rs2069952 | hCV11189164 | rs3746427 | 0.51 | 0.131481735 | 1 |
| hCV1825046 | rs2069952 | hCV11189240 | rs2038504 | 0.51 | 0.131481735 | 0.7662 |
| hCV1825046 | rs2069952 | hCV11189318 | rs7263251 | 0.51 | 0.131481735 | 0.1718 |
| hCV1825046 | rs2069952 | hCV11189331 | rs6087649 | 0.51 | 0.131481735 | 0.5093 |
| hCV1825046 | rs2069952 | hCV11189332 | rs2273683 | 0.51 | 0.131481735 | 0.4987 |
| hCV1825046 | rs2069952 | hCV11189369 | rs6119535 | 0.51 | 0.131481735 | 0.2714 |
| hCV1825046 | rs2069952 | hCV11189450 | rs6060048 | 0.51 | 0.131481735 | 0.3343 |
| hCV1825046 | rs2069952 | hCV11656916 | rs7004 | 0.51 | 0.131481735 | 0.1338 |
| hCV1825046 | rs2069952 | hCV11656971 | rs2050652 | 0.51 | 0.131481735 | 0.3132 |
| hCV1825046 | rs2069952 | hCV11656979 | rs2065108 | 0.51 | 0.131481735 | 0.4684 |
| hCV1825046 | rs2069952 | hCV11656982 | rs1885115 | 0.51 | 0.131481735 | 0.3304 |
| hCV1825046 | rs2069952 | hCV11656983 | rs1998233 | 0.51 | 0.131481735 | 0.2712 |
| hCV1825046 | rs2069952 | hCV11656986 | rs1885119 | 0.51 | 0.131481735 | 0.4132 |
| hCV1825046 | rs2069952 | hCV1207858 | rs6141514 | 0.51 | 0.131481735 | 0.2888 |
| hCV1825046 | rs2069952 | hCV1207862 | rs6119524 | 0.51 | 0.131481735 | 0.2714 |
| hCV1825046 | rs2069952 | hCV1207879 | rs2295354 | 0.51 | 0.131481735 | 0.2537 |
| hCV1825046 | rs2069952 | hCV1207880 | rs2295353 | 0.51 | 0.131481735 | 0.2714 |
| hCV1825046 | rs2069952 | hCV1207887 | rs959829 | 0.51 | 0.131481735 | 0.5093 |
| hCV1825046 | rs2069952 | hCV1207889 | rs1998028 | 0.51 | 0.131481735 | 0.3128 |
| hCV1825046 | rs2069952 | hCV1207890 | rs6087625 | 0.51 | 0.131481735 | 0.2714 |
| hCV1825046 | rs2069952 | hCV1207891 | rs2378259 | 0.51 | 0.131481735 | 0.3343 |
| hCV1825046 | rs2069952 | hCV1207893 | rs6087624 | 0.51 | 0.131481735 | 0.3703 |
| hCV1825046 | rs2069952 | hCV1207895 | rs6120708 | 0.51 | 0.131481735 | 0.2714 |
| hCV1825046 | rs2069952 | hCV1207897 | rs3787222 | 0.51 | 0.131481735 | 0.3012 |
| hCV1825046 | rs2069952 | hCV1207898 | rs1018503 | 0.51 | 0.131481735 | 0.3343 |
| hCV1825046 | rs2069952 | hCV1207902 | rs2295352 | 0.51 | 0.131481735 | 0.5351 |
| hCV1825046 | rs2069952 | hCV1207903 | rs6087623 | 0.51 | 0.131481735 | 0.3128 |
| hCV1825046 | rs2069952 | hCV1207909 | rs6119512 | 0.51 | 0.131481735 | 0.3128 |
| hCV1825046 | rs2069952 | hCV1207914 | rs910870 | 0.51 | 0.131481735 | 0.3128 |
| hCV1825046 | rs2069952 | hCV1207915 | rs910869 | 0.51 | 0.131481735 | 0.2471 |
| hCV1825046 | rs2069952 | hCV1265078 | rs6088569 | 0.51 | 0.131481735 | 0.4047 |
| hCV1825046 | rs2069952 | hCV1265079 | rs6088570 | 0.51 | 0.131481735 | 0.4069 |
| hCV1825046 | rs2069952 | hCV1265082 | rs6088575 | 0.51 | 0.131481735 | 0.4069 |
| hCV1825046 | rs2069952 | hCV1265086 | rs2378251 | 0.51 | 0.131481735 | 0.4069 |
| hCV1825046 | rs2069952 | hCV1265087 | rs2889855 | 0.51 | 0.131481735 | 0.4069 |
| hCV1825046 | rs2069952 | hCV1265092 | rs6088578 | 0.51 | 0.131481735 | 0.4403 |
| hCV1825046 | rs2069952 | hCV1265109 | rs6058108 | 0.51 | 0.131481735 | 0.2714 |
| hCV1825046 | rs2069952 | hCV1271625 | rs6060341 | 0.51 | 0.131481735 | 0.1454 |
| hCV1825046 | rs2069952 | hCV1271649 | rs6120880 | 0.51 | 0.131481735 | 0.3283 |
| hCV1825046 | rs2069952 | hCV1271653 | rs2425019 | 0.51 | 0.131481735 | 0.1786 |
| hCV1825046 | rs2069952 | hCV1271661 | rs6088765 | 0.51 | 0.131481735 | 0.2649 |
| hCV1825046 | rs2069952 | hCV1271671 | rs2093058 | 0.51 | 0.131481735 | 1 |
| hCV1825046 | rs2069952 | hCV1271676 | rs1577924 | 0.51 | 0.131481735 | 1 |
| hCV1825046 | rs2069952 | hCV1271685 | rs663550 | 0.51 | 0.131481735 | 0.9658 |
| hCV1825046 | rs2069952 | hCV1271688 | rs6058202 | 0.51 | 0.131481735 | 1 |
| hCV1825046 | rs2069952 | hCV1347919 | rs1058003 | 0.51 | 0.131481735 | 0.4132 |
| hCV1825046 | rs2069952 | hCV1347925 | rs6120790 | 0.51 | 0.131481735 | 0.1339 |
| hCV1825046 | rs2069952 | hCV1347930 | rs3736802 | 0.51 | 0.131481735 | 0.4897 |
| hCV1825046 | rs2069952 | hCV1347943 | rs6060164 | 0.51 | 0.131481735 | 0.3948 |
| hCV1825046 | rs2069952 | hCV1347944 | rs6087660 | 0.51 | 0.131481735 | 0.4132 |
| hCV1825046 | rs2069952 | hCV1347963 | rs13042358 | 0.51 | 0.131481735 | 0.7561 |
| hCV1825046 | rs2069952 | hCV1348023 | rs6087677 | 0.51 | 0.131481735 | 0.4741 |
| hCV1825046 | rs2069952 | hCV1361222 | rs3818273 | 0.51 | 0.131481735 | 0.5093 |
| hCV1825046 | rs2069952 | hCV1361223 | rs3746450 | 0.51 | 0.131481735 | 0.5351 |
| hCV1825046 | rs2069952 | hCV15860322 | rs2069948 | 0.51 | 0.131481735 | 1 |
| hCV1825046 | rs2069952 | hCV15870054 | rs2224320 | 0.51 | 0.131481735 | 0.429 |
| hCV1825046 | rs2069952 | hCV15876219 | rs2281626 | 0.51 | 0.131481735 | 0.2747 |
| hCV1825046 | rs2069952 | hCV16003843 | rs2378332 | 0.51 | 0.131481735 | 0.3948 |
| hCV1825046 | rs2069952 | hCV16013546 | rs2425012 | 0.51 | 0.131481735 | 0.7218 |
| hCV1825046 | rs2069952 | hCV16013558 | rs2425009 | 0.51 | 0.131481735 | 0.2569 |
| hCV1825046 | rs2069952 | hCV16013570 | rs2077574 | 0.51 | 0.131481735 | 0.2569 |
| hCV1825046 | rs2069952 | hCV16013581 | rs2253484 | 0.51 | 0.131481735 | 0.4987 |
| hCV1825046 | rs2069952 | hCV16013593 | rs2425001 | 0.51 | 0.131481735 | 0.3727 |
| hCV1825046 | rs2069952 | hCV16013594 | rs2424999 | 0.51 | 0.131481735 | 0.5093 |
| hCV1825046 | rs2069952 | hCV16013698 | rs2425052 | 0.51 | 0.131481735 | 0.1551 |
| hCV1825046 | rs2069952 | hCV16013724 | rs2425044 | 0.51 | 0.131481735 | 0.158 |
| hCV1825046 | rs2069952 | hCV16076405 | rs2145557 | 0.51 | 0.131481735 | 0.4321 |
| hCV1825046 | rs2069952 | hCV16179579 | rs2273684 | 0.51 | 0.131481735 | 0.3893 |
| hCV1825046 | rs2069952 | hCV16179908 | rs2273805 | 0.51 | 0.131481735 | 0.4805 |
| hCV1825046 | rs2069952 | hCV16190708 | rs2295701 | 0.51 | 0.131481735 | 0.2554 |
| hCV1825046 | rs2069952 | hCV16191203 | rs2295887 | 0.51 | 0.131481735 | 0.4684 |
| hCV1825046 | rs2069952 | hCV16191204 | rs2295886 | 0.51 | 0.131481735 | 0.3062 |
| hCV1825046 | rs2069952 | hCV16191205 | rs2295885 | 0.51 | 0.131481735 | 0.3062 |
| hCV1825046 | rs2069952 | hCV1825004 | rs1415771 | 0.51 | 0.131481735 | 0.7302 |
| hCV1825046 | rs2069952 | hCV1825005 | rs945959 | 0.51 | 0.131481735 | 0.7327 |
| hCV1825046 | rs2069952 | hCV1825006 | rs1124511 | 0.51 | 0.131481735 | 0.7327 |
| hCV1825046 | rs2069952 | hCV1825018 | rs11696967 | 0.51 | 0.131481735 | 0.2033 |
| hCV1825046 | rs2069952 | hCV1825019 | rs6088732 | 0.51 | 0.131481735 | 0.2033 |
| hCV1825046 | rs2069952 | hCV1825021 | rs6088733 | 0.51 | 0.131481735 | 0.2195 |
| hCV1825046 | rs2069952 | hCV1825025 | rs6088738 | 0.51 | 0.131481735 | 0.2033 |
| hCV1825046 | rs2069952 | hCV1825040 | rs6060278 | 0.51 | 0.131481735 | 0.2033 |
| hCV1825046 | rs2069952 | hCV1825047 | rs9574 | 0.51 | 0.131481735 | 1 |
| hCV1825046 | rs2069952 | hCV1825056 | rs6060285 | 0.51 | 0.131481735 | 0.9635 |
| hCV1825046 | rs2069952 | hCV1825062 | rs6087685 | 0.51 | 0.131481735 | 0.2311 |
| hCV1825046 | rs2069952 | hCV2142560 | rs4911449 | 0.51 | 0.131481735 | 0.5093 |
| hCV1825046 | rs2069952 | hCV2142561 | rs4911450 | 0.51 | 0.131481735 | 0.5351 |
| hCV1825046 | rs2069952 | hCV2142562 | rs4911451 | 0.51 | 0.131481735 | 0.5486 |
| hCV1825046 | rs2069952 | hCV2142566 | rs6088650 | 0.51 | 0.131481735 | 0.5093 |
| hCV1825046 | rs2069952 | hCV2142567 | rs725521 | 0.51 | 0.131481735 | 0.5093 |
| hCV1825046 | rs2069952 | hCV2142575 | rs2236270 | 0.51 | 0.131481735 | 0.2714 |
| hCV1825046 | rs2069952 | hCV2142576 | rs2236271 | 0.51 | 0.131481735 | 0.5093 |
| hCV1825046 | rs2069952 | hCV2142578 | rs6088655 | 0.51 | 0.131481735 | 0.5093 |
| hCV1825046 | rs2069952 | hCV2142584 | rs3761144 | 0.51 | 0.131481735 | 0.6325 |
| hCV1825046 | rs2069952 | hCV2142586 | rs6060130 | 0.51 | 0.131481735 | 0.6325 |
| hCV1825046 | rs2069952 | hCV2142587 | rs6088664 | 0.51 | 0.131481735 | 0.6283 |
| hCV1825046 | rs2069952 | hCV2142597 | rs6120778 | 0.51 | 0.131481735 | 0.7561 |
| hCV1825046 | rs2069952 | hCV2142599 | rs6060140 | 0.51 | 0.131481735 | 0.7561 |
| hCV1825046 | rs2069952 | hCV2142611 | rs1885114 | 0.51 | 0.131481735 | 0.7561 |
| hCV1825046 | rs2069952 | hCV2142616 | rs3746438 | 0.51 | 0.131481735 | 0.6906 |
| hCV1825046 | rs2069952 | hCV2521759 | rs2076668 | 0.51 | 0.131481735 | 0.3128 |
| hCV1825046 | rs2069952 | hCV2521760 | rs6088624 | 0.51 | 0.131481735 | 0.3189 |
| hCV1825046 | rs2069952 | hCV2521763 | rs12625149 | 0.51 | 0.131481735 | 0.255 |
| hCV1825046 | rs2069952 | hCV2521764 | rs12626122 | 0.51 | 0.131481735 | 0.2714 |
| hCV1825046 | rs2069952 | hCV2521776 | rs6087634 | 0.51 | 0.131481735 | 0.5093 |
| hCV1825046 | rs2069952 | hCV25619953 | rs6060151 | 0.51 | 0.131481735 | 0.4132 |
| hCV1825046 | rs2069952 | hCV25619954 | rs4911462 | 0.51 | 0.131481735 | 0.4132 |
| hCV1825046 | rs2069952 | hCV25619982 | rs6120838 | 0.51 | 0.131481735 | 0.5278 |
| hCV1825046 | rs2069952 | hCV25750225 | rs4911163 | 0.51 | 0.131481735 | 0.5093 |
| hCV1825046 | rs2069952 | hCV27166951 | rs6087663 | 0.51 | 0.131481735 | 0.2569 |
| hCV1825046 | rs2069952 | hCV27166987 | rs6119542 | 0.51 | 0.131481735 | 0.5351 |
| hCV1825046 | rs2069952 | hCV27166995 | rs6088618 | 0.51 | 0.131481735 | 0.4255 |
| hCV1825046 | rs2069952 | hCV27166997 | rs6088615 | 0.51 | 0.131481735 | 0.2714 |
| hCV1825046 | rs2069952 | hCV27167007 | rs2180276 | 0.51 | 0.131481735 | 0.3128 |
| hCV1825046 | rs2069952 | hCV27167022 | rs6060013 | 0.51 | 0.131481735 | 0.3242 |
| hCV1825046 | rs2069952 | hCV27167045 | rs2378252 | 0.51 | 0.131481735 | 0.2702 |
| hCV1825046 | rs2069952 | hCV27167691 | rs2378333 | 0.51 | 0.131481735 | 0.4684 |
| hCV1825046 | rs2069952 | hCV27167696 | rs6088716 | 0.51 | 0.131481735 | 0.4698 |
| hCV1825046 | rs2069952 | hCV27472681 | rs3746430 | 0.51 | 0.131481735 | 0.2569 |
| hCV1825046 | rs2069952 | hCV27486123 | rs3803937 | 0.51 | 0.131481735 | 0.4167 |
| hCV1825046 | rs2069952 | hCV27503616 | rs3803938 | 0.51 | 0.131481735 | 0.4132 |
| hCV1825046 | rs2069952 | hCV27833500 | rs17092385 | 0.51 | 0.131481735 | 0.15 |
| hCV1825046 | rs2069952 | hCV27893015 | rs4911167 | 0.51 | 0.131481735 | 0.4132 |
| hCV1825046 | rs2069952 | hCV27893018 | rs4911441 | 0.51 | 0.131481735 | 0.3592 |
| hCV1825046 | rs2069952 | hCV27982387 | rs4911460 | 0.51 | 0.131481735 | 0.3948 |
| hCV1825046 | rs2069952 | hCV28004288 | rs4911455 | 0.51 | 0.131481735 | 0.1718 |
| hCV1825046 | rs2069952 | hCV29372788 | rs6060163 | 0.51 | 0.131481735 | 0.2554 |
| hCV1825046 | rs2069952 | hCV29372800 | rs6058149 | 0.51 | 0.131481735 | 0.1519 |
| hCV1825046 | rs2069952 | hCV29372802 | rs6579204 | 0.51 | 0.131481735 | 0.2141 |
| hCV1825046 | rs2069952 | hCV29372803 | rs6088659 | 0.51 | 0.131481735 | 0.1833 |
| hCV1825046 | rs2069952 | hCV29372811 | rs7266550 | 0.51 | 0.131481735 | 0.5093 |
| hCV1825046 | rs2069952 | hCV29372820 | rs6120739 | 0.51 | 0.131481735 | 0.5093 |
| hCV1825046 | rs2069952 | hCV29372834 | rs6060001 | 0.51 | 0.131481735 | 0.3893 |
| hCV1825046 | rs2069952 | hCV29373050 | rs6088722 | 0.51 | 0.131481735 | 0.3062 |
| hCV1825046 | rs2069952 | hCV29373051 | rs6142300 | 0.51 | 0.131481735 | 0.3062 |
| hCV1825046 | rs2069952 | hCV29373055 | rs6060196 | 0.51 | 0.131481735 | 0.2707 |
| hCV1825046 | rs2069952 | hCV29530377 | rs6088747 | 0.51 | 0.131481735 | 1 |
| hCV1825046 | rs2069952 | hCV29530378 | rs6058179 | 0.51 | 0.131481735 | 0.3062 |
| hCV1825046 | rs2069952 | hCV29566578 | rs6060172 | 0.51 | 0.131481735 | 0.3948 |
| hCV1825046 | rs2069952 | hCV29584663 | rs6060162 | 0.51 | 0.131481735 | 0.3948 |
| hCV1825046 | rs2069952 | hCV29620866 | rs6088724 | 0.51 | 0.131481735 | 0.4805 |
| hCV1825046 | rs2069952 | hCV29638959 | rs6060154 | 0.51 | 0.131481735 | 0.2554 |
| hCV1825046 | rs2069952 | hCV29674936 | rs6087618 | 0.51 | 0.131481735 | 0.307 |
| hCV1825046 | rs2069952 | hCV29674974 | rs6058224 | 0.51 | 0.131481735 | 0.158 |
| hCV1825046 | rs2069952 | hCV29674976 | rs6060266 | 0.51 | 0.131481735 | 0.1983 |
| hCV1825046 | rs2069952 | hCV2969302 | rs6120730 | 0.51 | 0.131481735 | 0.3454 |
| hCV1825046 | rs2069952 | hCV2969304 | rs2424997 | 0.51 | 0.131481735 | 0.3343 |
| hCV1825046 | rs2069952 | hCV2969305 | rs6060052 | 0.51 | 0.131481735 | 0.323 |
| hCV1825046 | rs2069952 | hCV29693115 | rs6119534 | 0.51 | 0.131481735 | 0.2714 |
| hCV1825046 | rs2069952 | hCV29693120 | rs6060003 | 0.51 | 0.131481735 | 0.3893 |
| hCV1825046 | rs2069952 | hCV29693169 | rs6058192 | 0.51 | 0.131481735 | 0.2935 |
| hCV1825046 | rs2069952 | hCV29711231 | rs6119536 | 0.51 | 0.131481735 | 0.5351 |
| hCV1825046 | rs2069952 | hCV29729418 | rs6142294 | 0.51 | 0.131481735 | 0.8242 |
| hCV1825046 | rs2069952 | hCV29747405 | rs6088640 | 0.51 | 0.131481735 | 0.5093 |
| hCV1825046 | rs2069952 | hCV29747445 | rs6060199 | 0.51 | 0.131481735 | 0.7956 |
| hCV1825046 | rs2069952 | hCV29783257 | rs6087619 | 0.51 | 0.131481735 | 0.2714 |
| hCV1825046 | rs2069952 | hCV29819450 | rs4142034 | 0.51 | 0.131481735 | 0.2554 |
| hCV1825046 | rs2069952 | hCV29837701 | rs6060045 | 0.51 | 0.131481735 | 0.3343 |
| hCV1825046 | rs2069952 | hCV29837747 | rs6088728 | 0.51 | 0.131481735 | 0.4684 |
| hCV1825046 | rs2069952 | hCV29837748 | rs6088721 | 0.51 | 0.131481735 | 0.4684 |
| hCV1825046 | rs2069952 | hCV29855628 | rs6058150 | 0.51 | 0.131481735 | 0.1718 |
| hCV1825046 | rs2069952 | hCV29855681 | rs6087683 | 0.51 | 0.131481735 | 1 |
| hCV1825046 | rs2069952 | hCV29855684 | rs6120816 | 0.51 | 0.131481735 | 0.4132 |
| hCV1825046 | rs2069952 | hCV2988252 | rs2425005 | 0.51 | 0.131481735 | 0.5351 |
| hCV1825046 | rs2069952 | hCV2988253 | rs6087632 | 0.51 | 0.131481735 | 0.2714 |
| hCV1825046 | rs2069952 | hCV2988254 | rs6060064 | 0.51 | 0.131481735 | 0.5093 |
| hCV1825046 | rs2069952 | hCV29909897 | rs6142324 | 0.51 | 0.131481735 | 1 |
| hCV1825046 | rs2069952 | hCV29909901 | rs6060205 | 0.51 | 0.131481735 | 0.4332 |
| hCV1825046 | rs2069952 | hCV29945782 | rs6087626 | 0.51 | 0.131481735 | 0.2714 |
| hCV1825046 | rs2069952 | hCV29963933 | rs6088590 | 0.51 | 0.131481735 | 0.2714 |
| hCV1825046 | rs2069952 | hCV29982069 | rs6060170 | 0.51 | 0.131481735 | 0.3857 |
| hCV1825046 | rs2069952 | hCV29982073 | rs6088580 | 0.51 | 0.131481735 | 0.4112 |
| hCV1825046 | rs2069952 | hCV30000150 | rs4911465 | 0.51 | 0.131481735 | 0.2707 |
| hCV1825046 | rs2069952 | hCV30035910 | rs6088692 | 0.51 | 0.131481735 | 0.4132 |
| hCV1825046 | rs2069952 | hCV30053848 | rs6088687 | 0.51 | 0.131481735 | 0.3948 |
| hCV1825046 | rs2069952 | hCV30053849 | rs6088677 | 0.51 | 0.131481735 | 0.2554 |
| hCV1825046 | rs2069952 | hCV30053852 | rs6088660 | 0.51 | 0.131481735 | 0.1575 |
| hCV1825046 | rs2069952 | hCV30072029 | rs6119516 | 0.51 | 0.131481735 | 0.2714 |
| hCV1825046 | rs2069952 | hCV30090036 | rs6120747 | 0.51 | 0.131481735 | 0.2714 |
| hCV1825046 | rs2069952 | hCV3010271 | rs2889861 | 0.51 | 0.131481735 | 0.5093 |
| hCV1825046 | rs2069952 | hCV30126097 | rs6120827 | 0.51 | 0.131481735 | 0.2707 |
| hCV1825046 | rs2069952 | hCV30144027 | rs6119559 | 0.51 | 0.131481735 | 0.2569 |
| hCV1825046 | rs2069952 | hCV30162176 | rs6060127 | 0.51 | 0.131481735 | 0.1698 |
| hCV1825046 | rs2069952 | hCV30162181 | rs6120723 | 0.51 | 0.131481735 | 0.2714 |
| hCV1825046 | rs2069952 | hCV30180146 | rs6060216 | 0.51 | 0.131481735 | 0.4122 |
| hCV1825046 | rs2069952 | hCV30198062 | rs6088764 | 0.51 | 0.131481735 | 0.2291 |
| hCV1825046 | rs2069952 | hCV30270039 | rs6060301 | 0.51 | 0.131481735 | 0.4086 |
| hCV1825046 | rs2069952 | hCV30323913 | rs6060137 | 0.51 | 0.131481735 | 0.2554 |
| hCV1825046 | rs2069952 | hCV30323914 | rs6087657 | 0.51 | 0.131481735 | 0.2569 |
| hCV1825046 | rs2069952 | hCV30342005 | rs6060133 | 0.51 | 0.131481735 | 0.198 |
| hCV1825046 | rs2069952 | hCV30342055 | rs6088727 | 0.51 | 0.131481735 | 0.4684 |
| hCV1825046 | rs2069952 | hCV30360331 | rs6088568 | 0.51 | 0.131481735 | 0.4069 |
| hCV1825046 | rs2069952 | hCV30360384 | rs6058194 | 0.51 | 0.131481735 | 0.2195 |
| hCV1825046 | rs2069952 | hCV30378399 | rs6141509 | 0.51 | 0.131481735 | 0.3343 |
| hCV1825046 | rs2069952 | hCV30378437 | rs6088713 | 0.51 | 0.131481735 | 0.3062 |
| hCV1825046 | rs2069952 | hCV30396340 | rs6120849 | 0.51 | 0.131481735 | 0.216 |
| hCV1825046 | rs2069952 | hCV30450320 | rs4911478 | 0.51 | 0.131481735 | 1 |
| hCV1825046 | rs2069952 | hCV30450323 | rs6058166 | 0.51 | 0.131481735 | 0.4122 |
| hCV1825046 | rs2069952 | hCV30468101 | rs6088735 | 0.51 | 0.131481735 | 0.2033 |
| hCV1825046 | rs2069952 | hCV30485907 | rs6087653 | 0.51 | 0.131481735 | 0.5093 |
| hCV1825046 | rs2069952 | hCV30503905 | rs4911165 | 0.51 | 0.131481735 | 0.1823 |
| hCV1825046 | rs2069952 | hCV30503911 | rs4911161 | 0.51 | 0.131481735 | 0.5093 |
| hCV1825046 | rs2069952 | hCV30503955 | rs6060194 | 0.51 | 0.131481735 | 0.2554 |
| hCV1825046 | rs2069952 | hCV30540259 | rs6087664 | 0.51 | 0.131481735 | 0.4132 |
| hCV1825046 | rs2069952 | hCV30558455 | rs6088638 | 0.51 | 0.131481735 | 0.1462 |
| hCV1825046 | rs2069952 | hCV30594383 | rs6060038 | 0.51 | 0.131481735 | 0.3343 |
| hCV1825046 | rs2069952 | hCV30612241 | rs6060168 | 0.51 | 0.131481735 | 0.7561 |
| hCV1825046 | rs2069952 | hCV30612290 | rs6060250 | 0.51 | 0.131481735 | 0.3355 |
| hCV1825046 | rs2069952 | hCV30630342 | rs6141526 | 0.51 | 0.131481735 | 0.7713 |
| hCV1825046 | rs2069952 | hCV30630345 | rs4911456 | 0.51 | 0.131481735 | 0.2554 |
| hCV1825046 | rs2069952 | hCV32066111 | rs10875492 | 0.51 | 0.131481735 | 0.3927 |
| hCV1825046 | rs2069952 | hCV32066659 | rs7272884 | 0.51 | 0.131481735 | 0.158 |
| hCV1825046 | rs2069952 | hCV3249260 | rs7263157 | 0.51 | 0.131481735 | 0.5093 |
| hCV1825046 | rs2069952 | hCV3249262 | rs6120750 | 0.51 | 0.131481735 | 0.2537 |
| hCV1825046 | rs2069952 | hCV3249263 | rs6088635 | 0.51 | 0.131481735 | 0.5093 |
| hCV1825046 | rs2069952 | hCV3249264 | rs6087641 | 0.51 | 0.131481735 | 0.5093 |
| hCV1825046 | rs2069952 | hCV3249268 | rs6058137 | 0.51 | 0.131481735 | 0.5093 |
| hCV1825046 | rs2069952 | hCV3249269 | rs8116657 | 0.51 | 0.131481735 | 0.5351 |
| hCV1825046 | rs2069952 | hCV3249271 | rs4911164 | 0.51 | 0.131481735 | 0.5351 |
| hCV1825046 | rs2069952 | hCV3249272 | rs6087644 | 0.51 | 0.131481735 | 0.5123 |
| hCV1825046 | rs2069952 | hCV3249275 | rs6088642 | 0.51 | 0.131481735 | 0.5093 |
| hCV1825046 | rs2069952 | hCV3249278 | rs6120757 | 0.51 | 0.131481735 | 0.5093 |
| hCV1825046 | rs2069952 | hCV3249279 | rs926734 | 0.51 | 0.131481735 | 0.5093 |
| hCV1825046 | rs2069952 | hCV3249280 | rs6120758 | 0.51 | 0.131481735 | 0.5093 |
| hCV1825046 | rs2069952 | hCV3249282 | rs2064454 | 0.51 | 0.131481735 | 0.5093 |
| hCV1825046 | rs2069952 | hCV3249286 | rs6088646 | 0.51 | 0.131481735 | 0.5093 |
| hCV1825046 | rs2069952 | hCV3249289 | rs2223881 | 0.51 | 0.131481735 | 0.5351 |
| hCV1825046 | rs2069952 | hCV3249290 | rs2076667 | 0.51 | 0.131481735 | 0.5093 |
| hCV1825046 | rs2069952 | hCV3249293 | rs6058154 | 0.51 | 0.131481735 | 0.7561 |
| hCV1825046 | rs2069952 | hCV599565 | rs633198 | 0.51 | 0.131481735 | 1 |
| hCV1825046 | rs2069952 | hCV624502 | rs666210 | 0.51 | 0.131481735 | 0.2804 |
| hCV1825046 | rs2069952 | hCV624503 | rs633784 | 0.51 | 0.131481735 | 0.2804 |
| hCV1825046 | rs2069952 | hCV7499886 | rs1415774 | 0.51 | 0.131481735 | 1 |
| hCV1825046 | rs2069952 | hCV7593276 | rs1535466 | 0.51 | 0.131481735 | 0.3224 |
| hCV1825046 | rs2069952 | hCV7593320 | rs1060615 | 0.51 | 0.131481735 | 0.4769 |
| hCV1825046 | rs2069952 | hCV7593321 | rs1013677 | 0.51 | 0.131481735 | 0.5093 |
| hCV1825046 | rs2069952 | hCV7593328 | rs1018447 | 0.51 | 0.131481735 | 0.5093 |
| hCV1825046 | rs2069952 | hDV70862585 | rs17092209 | 0.51 | 0.131481735 | 0.1405 |
| hCV1825046 | rs2069952 | hDV70862720 | rs17092378 | 0.51 | 0.131481735 | 0.3132 |
| hCV1825046 | rs2069952 | hDV70936356 | rs17310782 | 0.51 | 0.131481735 | 0.2554 |
| hCV1825046 | rs2069952 | hDV71833331 | rs6142280 | 0.51 | 0.131481735 | 0.7559 |
| hCV1825046 | rs2069952 | hDV71898298 | rs7361656 | 0.51 | 0.131481735 | 0.2982 |
| hCV1825046 | rs2069952 | hDV72053898 | rs8114671 | 0.51 | 0.131481735 | 1 |
| hCV1841975 | rs1799810 | hCV11263777 | rs11683986 | 0.51 | 0.254914511 | 0.4647 |
| hCV1841975 | rs1799810 | hCV11263786 | rs13408910 | 0.51 | 0.254914511 | 0.429 |
| hCV1841975 | rs1799810 | hCV11266746 | rs6753288 | 0.51 | 0.254914511 | 0.834 |
| hCV1841975 | rs1799810 | hCV11266765 | rs11679414 | 0.51 | 0.254914511 | 0.5751 |
| hCV1841975 | rs1799810 | hCV11268771 | rs4662718 | 0.51 | 0.254914511 | 0.5598 |
| hCV1841975 | rs1799810 | hCV12046224 | rs10850 | 0.51 | 0.254914511 | 0.5598 |
| hCV1841975 | rs1799810 | hCV1441133 | rs7568070 | 0.51 | 0.254914511 | 0.356 |
| hCV1841975 | rs1799810 | hCV1441173 | rs4536600 | 0.51 | 0.254914511 | 0.641 |
| hCV1841975 | rs1799810 | hCV1441189 | rs4150499 | 0.51 | 0.254914511 | 0.5379 |
| hCV1841975 | rs1799810 | hCV1441196 | rs4150474 | 0.51 | 0.254914511 | 0.5354 |
| hCV1841975 | rs1799810 | hCV15860236 | rs2069904 | 0.51 | 0.254914511 | 0.7263 |
| hCV1841975 | rs1799810 | hCV169044 | rs11691088 | 0.51 | 0.254914511 | 0.5832 |
| hCV1841975 | rs1799810 | hCV1841983 | rs5937 | 0.51 | 0.254914511 | 0.6119 |
| hCV1841975 | rs1799810 | hCV25630050 | rs3732209 | 0.51 | 0.254914511 | 0.5787 |
| hCV1841975 | rs1799810 | hCV25960135 | rs4150402 | 0.51 | 0.254914511 | 0.5598 |
| hCV1841975 | rs1799810 | hCV26980926 | rs4150471 | 0.51 | 0.254914511 | 0.5379 |
| hCV1841975 | rs1799810 | hCV273435 | rs7607907 | 0.51 | 0.254914511 | 0.5598 |
| hCV1841975 | rs1799810 | hCV27907596 | rs4321325 | 0.51 | 0.254914511 | 0.335 |
| hCV1841975 | rs1799810 | hCV27964958 | rs4662713 | 0.51 | 0.254914511 | 0.5598 |
| hCV1841975 | rs1799810 | hCV28026949 | rs4662720 | 0.51 | 0.254914511 | 0.5598 |
| hCV1841975 | rs1799810 | hCV28952331 | rs6755028 | 0.51 | 0.254914511 | 0.5319 |
| hCV1841975 | rs1799810 | hCV28955091 | rs7567389 | 0.51 | 0.254914511 | 0.3991 |
| hCV1841975 | rs1799810 | hCV28955092 | rs6430936 | 0.51 | 0.254914511 | 0.5598 |
| hCV1841975 | rs1799810 | hCV28966787 | rs7585314 | 0.51 | 0.254914511 | 0.5343 |
| hCV1841975 | rs1799810 | hCV29570359 | rs6738690 | 0.51 | 0.254914511 | 0.5288 |
| hCV1841975 | rs1799810 | hCV29636350 | rs10496661 | 0.51 | 0.254914511 | 0.5598 |
| hCV1841975 | rs1799810 | hCV30166207 | rs7590030 | 0.51 | 0.254914511 | 0.5787 |
| hCV1841975 | rs1799810 | hCV30418053 | rs6757492 | 0.51 | 0.254914511 | 0.545 |
| hCV1841975 | rs1799810 | hCV30598525 | rs7556675 | 0.51 | 0.254914511 | 0.5598 |
| hCV1841975 | rs1799810 | hCV30711743 | rs11890243 | 0.51 | 0.254914511 | 0.4437 |
| hCV1841975 | rs1799810 | hCV31814195 | rs11680949 | 0.51 | 0.254914511 | 0.5659 |
| hCV1841975 | rs1799810 | hCV31814218 | rs6430938 | 0.51 | 0.254914511 | 0.6123 |
| hCV1841975 | rs1799810 | hCV8806682 | rs1011019 | 0.51 | 0.254914511 | 0.5598 |
| hCV1841975 | rs1799810 | hCV8807983 | rs1504136 | 0.51 | 0.254914511 | 0.5343 |
| hCV1841975 | rs1799810 | hCV8807988 | rs3893313 | 0.51 | 0.254914511 | 0.2563 |
| hCV1841975 | rs1799810 | hCV8807993 | rs1473623 | 0.51 | 0.254914511 | 0.5478 |
| hCV1841975 | rs1799810 | hCV8810479 | rs1604817 | 0.51 | 0.254914511 | 0.6417 |
| hCV1841975 | rs1799810 | hCV8810750 | rs1158867 | 0.51 | 0.254914511 | 1 |
| hCV1841975 | rs1799810 | hCV9465822 | rs11683427 | 0.51 | 0.254914511 | 0.3486 |
| hCV1841975 | rs1799810 | hCV9468542 | rs7599210 | 0.51 | 0.254914511 | 0.8322 |
| hCV1841975 | rs1799810 | hDV75209985 | rs2069898 | 0.51 | 0.254914511 | 0.7164 |
| hCV1841983 | rs5937 | hCV1023645 | rs334160 | 0.51 | 0.289879478 | 0.3788 |
| hCV1841983 | rs5937 | hCV1023646 | rs334159 | 0.51 | 0.289879478 | 0.3408 |
| hCV1841983 | rs5937 | hCV1023653 | rs334151 | 0.51 | 0.289879478 | 0.3788 |
| hCV1841983 | rs5937 | hCV1023659 | rs334146 | 0.51 | 0.289879478 | 0.3564 |
| hCV1841983 | rs5937 | hCV1023661 | rs334143 | 0.51 | 0.289879478 | 0.3543 |
| hCV1841983 | rs5937 | hCV1023665 | rs334138 | 0.51 | 0.289879478 | 0.3395 |
| hCV1841983 | rs5937 | hCV1023666 | rs334137 | 0.51 | 0.289879478 | 0.4012 |
| hCV1841983 | rs5937 | hCV1023669 | rs1075774 | 0.51 | 0.289879478 | 0.3374 |
| hCV1841983 | rs5937 | hCV11263777 | rs11683986 | 0.51 | 0.289879478 | 0.8536 |
| hCV1841983 | rs5937 | hCV11263778 | rs6749002 | 0.51 | 0.289879478 | 0.3378 |
| hCV1841983 | rs5937 | hCV11263786 | rs13408910 | 0.51 | 0.289879478 | 0.4521 |
| hCV1841983 | rs5937 | hCV11266746 | rs6753288 | 0.51 | 0.289879478 | 0.5815 |
| hCV1841983 | rs5937 | hCV11266765 | rs11679414 | 0.51 | 0.289879478 | 0.6966 |
| hCV1841983 | rs5937 | hCV11268771 | rs4662718 | 0.51 | 0.289879478 | 0.7374 |
| hCV1841983 | rs5937 | hCV12046142 | rs334152 | 0.51 | 0.289879478 | 0.3564 |
| hCV1841983 | rs5937 | hCV12046143 | rs334156 | 0.51 | 0.289879478 | 0.3564 |
| hCV1841983 | rs5937 | hCV12046144 | rs334158 | 0.51 | 0.289879478 | 0.3788 |
| hCV1841983 | rs5937 | hCV12046224 | rs10850 | 0.51 | 0.289879478 | 0.7374 |
| hCV1841983 | rs5937 | hCV12047693 | rs1864552 | 0.51 | 0.289879478 | 0.3779 |
| hCV1841983 | rs5937 | hCV1441133 | rs7568070 | 0.51 | 0.289879478 | 0.3758 |
| hCV1841983 | rs5937 | hCV1441173 | rs4536600 | 0.51 | 0.289879478 | 0.7198 |
| hCV1841983 | rs5937 | hCV1441189 | rs4150499 | 0.51 | 0.289879478 | 0.605 |
| hCV1841983 | rs5937 | hCV1441196 | rs4150474 | 0.51 | 0.289879478 | 0.6229 |
| hCV1841983 | rs5937 | hCV15860236 | rs2069904 | 0.51 | 0.289879478 | 0.9367 |
| hCV1841983 | rs5937 | hCV15917574 | rs2679409 | 0.51 | 0.289879478 | 0.3564 |
| hCV1841983 | rs5937 | hCV16241157 | rs2460106 | 0.51 | 0.289879478 | 0.3564 |
| hCV1841983 | rs5937 | hCV169044 | rs11691088 | 0.51 | 0.289879478 | 0.704 |
| hCV1841983 | rs5937 | hCV1721256 | rs2069910 | 0.51 | 0.289879478 | 0.3227 |
| hCV1841983 | rs5937 | hCV1841975 | rs1799810 | 0.51 | 0.289879478 | 0.6119 |
| hCV1841983 | rs5937 | hCV25630050 | rs3732209 | 0.51 | 0.289879478 | 0.7933 |
| hCV1841983 | rs5937 | hCV25960135 | rs4150402 | 0.51 | 0.289879478 | 0.7374 |
| hCV1841983 | rs5937 | hCV25971425 | rs4662741 | 0.51 | 0.289879478 | 0.3564 |
| hCV1841983 | rs5937 | hCV25993019 | rs11673952 | 0.51 | 0.289879478 | 0.3564 |
| hCV1841983 | rs5937 | hCV26980926 | rs4150471 | 0.51 | 0.289879478 | 0.6251 |
| hCV1841983 | rs5937 | hCV27271075 | rs2163348 | 0.51 | 0.289879478 | 0.3793 |
| hCV1841983 | rs5937 | hCV273435 | rs7607907 | 0.51 | 0.289879478 | 0.7374 |
| hCV1841983 | rs5937 | hCV27964958 | rs4662713 | 0.51 | 0.289879478 | 0.7178 |
| hCV1841983 | rs5937 | hCV28026949 | rs4662720 | 0.51 | 0.289879478 | 0.7374 |
| hCV1841983 | rs5937 | hCV28952331 | rs6755028 | 0.51 | 0.289879478 | 0.7962 |
| hCV1841983 | rs5937 | hCV28952333 | rs6754772 | 0.51 | 0.289879478 | 0.3767 |
| hCV1841983 | rs5937 | hCV28955091 | rs7567389 | 0.51 | 0.289879478 | 0.4991 |
| hCV1841983 | rs5937 | hCV28955092 | rs6430936 | 0.51 | 0.289879478 | 0.7189 |
| hCV1841983 | rs5937 | hCV28966787 | rs7585314 | 0.51 | 0.289879478 | 0.5885 |
| hCV1841983 | rs5937 | hCV29404615 | rs6709113 | 0.51 | 0.289879478 | 0.3311 |
| hCV1841983 | rs5937 | hCV29404616 | rs6706077 | 0.51 | 0.289879478 | 0.3564 |
| hCV1841983 | rs5937 | hCV29404621 | rs7600934 | 0.51 | 0.289879478 | 0.3564 |
| hCV1841983 | rs5937 | hCV29404688 | rs7582598 | 0.51 | 0.289879478 | 0.365 |
| hCV1841983 | rs5937 | hCV29570359 | rs6738690 | 0.51 | 0.289879478 | 0.6251 |
| hCV1841983 | rs5937 | hCV29636350 | rs10496661 | 0.51 | 0.289879478 | 0.7374 |
| hCV1841983 | rs5937 | hCV30166207 | rs7590030 | 0.51 | 0.289879478 | 0.7933 |
| hCV1841983 | rs5937 | hCV30418053 | rs6757492 | 0.51 | 0.289879478 | 0.6961 |
| hCV1841983 | rs5937 | hCV30598525 | rs7556675 | 0.51 | 0.289879478 | 0.7374 |
| hCV1841983 | rs5937 | hCV30711743 | rs11890243 | 0.51 | 0.289879478 | 0.5169 |
| hCV1841983 | rs5937 | hCV31814195 | rs11680949 | 0.51 | 0.289879478 | 0.6251 |
| hCV1841983 | rs5937 | hCV31814218 | rs6430938 | 0.51 | 0.289879478 | 0.8723 |
| hCV1841983 | rs5937 | hCV3212726 | rs12621149 | 0.51 | 0.289879478 | 0.292 |
| hCV1841983 | rs5937 | hCV822512 | rs334144 | 0.51 | 0.289879478 | 0.3564 |
| hCV1841983 | rs5937 | hCV8806682 | rs1011019 | 0.51 | 0.289879478 | 0.7374 |
| hCV1841983 | rs5937 | hCV8807983 | rs1504136 | 0.51 | 0.289879478 | 0.6258 |
| hCV1841983 | rs5937 | hCV8807993 | rs1473623 | 0.51 | 0.289879478 | 0.7761 |
| hCV1841983 | rs5937 | hCV8808000 | rs891514 | 0.51 | 0.289879478 | 0.3564 |
| hCV1841983 | rs5937 | hCV8810479 | rs1604817 | 0.51 | 0.289879478 | 0.6728 |
| hCV1841983 | rs5937 | hCV8810750 | rs1158867 | 0.51 | 0.289879478 | 0.6851 |
| hCV1841983 | rs5937 | hCV8836422 | rs777554 | 0.51 | 0.289879478 | 0.3932 |
| hCV1841983 | rs5937 | hCV8837013 | rs1019842 | 0.51 | 0.289879478 | 0.3723 |
| hCV1841983 | rs5937 | hCV8837014 | rs777569 | 0.51 | 0.289879478 | 0.3564 |
| hCV1841983 | rs5937 | hCV9465822 | rs11683427 | 0.51 | 0.289879478 | 0.4044 |
| hCV1841983 | rs5937 | hCV9468542 | rs7599210 | 0.51 | 0.289879478 | 0.5771 |
| hCV1841983 | rs5937 | hDV70929450 | rs17261845 | 0.51 | 0.289879478 | 0.2956 |
| hCV1841983 | rs5937 | hDV70929452 | rs17261859 | 0.51 | 0.289879478 | 0.2956 |
| hCV1841983 | rs5937 | hDV75209985 | rs2069898 | 0.51 | 0.289879478 | 0.8713 |
| hCV1859855 | rs2291260 | hCV12052839 | rs8021 | 0.51 | 0.469041298 | 0.5002 |
| hCV1859855 | rs2291260 | hCV16089184 | rs2873193 | 0.51 | 0.469041298 | 0.6229 |
| hCV1859855 | rs2291260 | hCV16174004 | rs2242291 | 0.51 | 0.469041298 | 0.6816 |
| hCV1859855 | rs2291260 | hCV1859872 | rs4758905 | 0.51 | 0.469041298 | 0.6816 |
| hCV1859855 | rs2291260 | hCV1859912 | rs12303977 | 0.51 | 0.469041298 | 0.6816 |
| hCV1859855 | rs2291260 | hCV1859941 | rs2306541 | 0.51 | 0.469041298 | 0.637 |
| hCV1859855 | rs2291260 | hCV1859948 | rs7297261 | 0.51 | 0.469041298 | 0.5354 |
| hCV1859855 | rs2291260 | hCV1859956 | rs7969859 | 0.51 | 0.469041298 | 0.6554 |
| hCV1859855 | rs2291260 | hCV1859996 | rs12815354 | 0.51 | 0.469041298 | 0.5246 |
| hCV1859855 | rs2291260 | hCV1859997 | rs12815207 | 0.51 | 0.469041298 | 0.5308 |
| hCV1859855 | rs2291260 | hCV25761477 | rs3741490 | 0.51 | 0.469041298 | 0.637 |
| hCV1859855 | rs2291260 | hCV27522090 | rs3825109 | 0.51 | 0.469041298 | 0.6918 |
| hCV1859855 | rs2291260 | hCV27964264 | rs4758939 | 0.51 | 0.469041298 | 0.6816 |
| hCV1859855 | rs2291260 | hCV30960162 | rs11147095 | 0.51 | 0.469041298 | 0.6816 |
| hCV1859855 | rs2291260 | hCV31631014 | rs12811327 | 0.51 | 0.469041298 | 0.5728 |
| hCV1952126 | rs7223784 | hCV11626701 | rs1032070 | 0.51 | 0.792412162 | 0.9128 |
| hCV1952126 | rs7223784 | hCV27485323 | rs3785897 | 0.51 | 0.792412162 | 0.8875 |
| hCV1952126 | rs7223784 | hCV2769165 | rs2071046 | 0.51 | 0.792412162 | 0.9129 |
| hCV1952126 | rs7223784 | hCV2977462 | rs4793099 | 0.51 | 0.792412162 | 0.9128 |
| hCV1952126 | rs7223784 | hCV3140239 | rs36023314 | 0.51 | 0.792412162 | 0.8867 |
| hCV1952126 | rs7223784 | hCV3140264 | rs6503704 | 0.51 | 0.792412162 | 1 |
| hCV1952126 | rs7223784 | hCV31652022 | rs12948909 | 0.51 | 0.792412162 | 1 |
| hCV1952126 | rs7223784 | hCV31652026 | rs11871801 | 0.51 | 0.792412162 | 1 |
| hCV1952126 | rs7223784 | hCV587962 | rs647397 | 0.51 | 0.792412162 | 0.8421 |
| hCV22272267 | rs3733402 | hCV11786147 | rs4862662 | 0.51 | 0.093086244 | 0.352 |
| hCV22272267 | rs3733402 | hCV11786203 | rs4253251 | 0.51 | 0.093086244 | 0.2672 |
| hCV22272267 | rs3733402 | hCV11786258 | rs4253303 | 0.51 | 0.093086244 | 0.5632 |
| hCV22272267 | rs3733402 | hCV11786259 | rs4253304 | 0.51 | 0.093086244 | 0.6456 |
| hCV22272267 | rs3733402 | hCV11786295 | rs4253421 | 0.51 | 0.093086244 | 0.1162 |
| hCV22272267 | rs3733402 | hCV11786327 | rs13133050 | 0.51 | 0.093086244 | 0.2482 |
| hCV22272267 | rs3733402 | hCV12066118 | rs2048 | 0.51 | 0.093086244 | 1 |
| hCV22272267 | rs3733402 | hCV12066119 | rs1912826 | 0.51 | 0.093086244 | 0.9284 |
| hCV22272267 | rs3733402 | hCV12066124 | rs2036914 | 0.51 | 0.093086244 | 0.3605 |
| hCV22272267 | rs3733402 | hCV12066129 | rs1593 | 0.51 | 0.093086244 | 0.1325 |
| hCV22272267 | rs3733402 | hCV1332991 | rs11723770 | 0.51 | 0.093086244 | 0.1232 |
| hCV22272267 | rs3733402 | hCV1332992 | rs12506228 | 0.51 | 0.093086244 | 0.1088 |
| hCV22272267 | rs3733402 | hCV15793897 | rs3087505 | 0.51 | 0.093086244 | 0.12 |
| hCV22272267 | rs3733402 | hCV15811716 | rs2102575 | 0.51 | 0.093086244 | 0.1089 |
| hCV22272267 | rs3733402 | hCV15968025 | rs2292425 | 0.51 | 0.093086244 | 0.18 |
| hCV22272267 | rs3733402 | hCV15968026 | rs2292426 | 0.51 | 0.093086244 | 0.2195 |
| hCV22272267 | rs3733402 | hCV15968034 | rs2292428 | 0.51 | 0.093086244 | 0.3058 |
| hCV22272267 | rs3733402 | hCV15968043 | rs2292423 | 0.51 | 0.093086244 | 0.6588 |
| hCV22272267 | rs3733402 | hCV15975109 | rs2304596 | 0.51 | 0.093086244 | 0.24 |
| hCV22272267 | rs3733402 | hCV2103337 | rs13102931 | 0.51 | 0.093086244 | 0.1025 |
| hCV22272267 | rs3733402 | hCV2103343 | rs4241824 | 0.51 | 0.093086244 | 0.3019 |
| hCV22272267 | rs3733402 | hCV2103391 | rs1008728 | 0.51 | 0.093086244 | 0.2065 |
| hCV22272267 | rs3733402 | hCV2103392 | rs12500826 | 0.51 | 0.093086244 | 0.1775 |
| hCV22272267 | rs3733402 | hCV22271609 | rs4253326 | 0.51 | 0.093086244 | 0.2299 |
| hCV22272267 | rs3733402 | hCV25474413 | rs3822057 | 0.51 | 0.093086244 | 0.312 |
| hCV22272267 | rs3733402 | hCV25474414 | rs4253399 | 0.51 | 0.093086244 | 0.1628 |
| hCV22272267 | rs3733402 | hCV25634763 | rs4253241 | 0.51 | 0.093086244 | 0.1188 |
| hCV22272267 | rs3733402 | hCV25634781 | rs4253299 | 0.51 | 0.093086244 | 0.2584 |
| hCV22272267 | rs3733402 | hCV25989001 | hCV25989001 | 0.51 | 0.093086244 | 0.2535 |
| hCV22272267 | rs3733402 | hCV25990131 | rs13146272 | 0.51 | 0.093086244 | 0.1915 |
| hCV22272267 | rs3733402 | hCV26265197 | rs10014399 | 0.51 | 0.093086244 | 0.2641 |
| hCV22272267 | rs3733402 | hCV26265199 | rs2221843 | 0.51 | 0.093086244 | 0.2584 |
| hCV22272267 | rs3733402 | hCV26265231 | rs7684025 | 0.51 | 0.093086244 | 0.3837 |
| hCV22272267 | rs3733402 | hCV27473099 | rs3733403 | 0.51 | 0.093086244 | 0.1386 |
| hCV22272267 | rs3733402 | hCV27477533 | rs3756008 | 0.51 | 0.093086244 | 0.1577 |
| hCV22272267 | rs3733402 | hCV27482765 | rs3775301 | 0.51 | 0.093086244 | 0.24 |
| hCV22272267 | rs3733402 | hCV27482766 | rs3775302 | 0.51 | 0.093086244 | 0.1546 |
| hCV22272267 | rs3733402 | hCV27506149 | rs3822055 | 0.51 | 0.093086244 | 0.2584 |
| hCV22272267 | rs3733402 | hCV27521729 | rs3822056 | 0.51 | 0.093086244 | 0.1313 |
| hCV22272267 | rs3733402 | hCV27902808 | rs4253236 | 0.51 | 0.093086244 | 0.6716 |
| hCV22272267 | rs3733402 | hCV29053264 | rs7667777 | 0.51 | 0.093086244 | 0.3951 |
| hCV22272267 | rs3733402 | hCV29053265 | rs4253244 | 0.51 | 0.093086244 | 0.6414 |
| hCV22272267 | rs3733402 | hCV29718000 | rs4253238 | 0.51 | 0.093086244 | 1 |
| hCV22272267 | rs3733402 | hCV29826351 | rs10025990 | 0.51 | 0.093086244 | 0.1333 |
| hCV22272267 | rs3733402 | hCV29877725 | rs4253295 | 0.51 | 0.093086244 | 0.5775 |
| hCV22272267 | rs3733402 | hCV30983907 | rs4253246 | 0.51 | 0.093086244 | 0.1188 |
| hCV22272267 | rs3733402 | hCV32209636 | rs11132387 | 0.51 | 0.093086244 | 0.1446 |
| hCV22272267 | rs3733402 | hCV32291217 | rs4253323 | 0.51 | 0.093086244 | 0.24 |
| hCV22272267 | rs3733402 | hCV32291269 | rs4253417 | 0.51 | 0.093086244 | 0.1165 |
| hCV22272267 | rs3733402 | hCV32291286 | rs4253422 | 0.51 | 0.093086244 | 0.168 |
| hCV22272267 | rs3733402 | hCV32291287 | rs4253423 | 0.51 | 0.093086244 | 0.168 |
| hCV22272267 | rs3733402 | hCV32291295 | rs4253292 | 0.51 | 0.093086244 | 0.2444 |
| hCV22272267 | rs3733402 | hCV32291301 | rs4253302 | 0.51 | 0.093086244 | 0.2397 |
| hCV22272267 | rs3733402 | hCV32295028 | rs4253260 | 0.51 | 0.093086244 | 0.24 |
| hCV22272267 | rs3733402 | hCV3229991 | rs4241815 | 0.51 | 0.093086244 | 1 |
| hCV22272267 | rs3733402 | hCV3229992 | rs3775298 | 0.51 | 0.093086244 | 1 |
| hCV22272267 | rs3733402 | hCV3229995 | rs11132382 | 0.51 | 0.093086244 | 1 |
| hCV22272267 | rs3733402 | hCV3230000 | rs4253294 | 0.51 | 0.093086244 | 0.4581 |
| hCV22272267 | rs3733402 | hCV3230001 | rs4253296 | 0.51 | 0.093086244 | 0.1188 |
| hCV22272267 | rs3733402 | hCV3230002 | rs4253297 | 0.51 | 0.093086244 | 0.5815 |
| hCV22272267 | rs3733402 | hCV3230003 | rs2304595 | 0.51 | 0.093086244 | 0.6471 |
| hCV22272267 | rs3733402 | hCV3230004 | rs4253301 | 0.51 | 0.093086244 | 0.1089 |
| hCV22272267 | rs3733402 | hCV3230006 | rs4253308 | 0.51 | 0.093086244 | 0.5775 |
| hCV22272267 | rs3733402 | hCV3230007 | rs4253311 | 0.51 | 0.093086244 | 1 |
| hCV22272267 | rs3733402 | hCV3230010 | rs4253315 | 0.51 | 0.093086244 | 0.1137 |
| hCV22272267 | rs3733402 | hCV3230011 | rs4253320 | 0.51 | 0.093086244 | 0.5815 |
| hCV22272267 | rs3733402 | hCV3230012 | rs4241821 | 0.51 | 0.093086244 | 0.2584 |
| hCV22272267 | rs3733402 | hCV3230013 | rs3775303 | 0.51 | 0.093086244 | 0.6456 |
| hCV22272267 | rs3733402 | hCV3230014 | rs4861709 | 0.51 | 0.093086244 | 0.4581 |
| hCV22272267 | rs3733402 | hCV3230016 | rs4253325 | 0.51 | 0.093086244 | 0.112 |
| hCV22272267 | rs3733402 | hCV3230017 | rs4253327 | 0.51 | 0.093086244 | 0.1008 |
| hCV22272267 | rs3733402 | hCV3230018 | rs925453 | 0.51 | 0.093086244 | 0.4359 |
| hCV22272267 | rs3733402 | hCV3230019 | rs4253332 | 0.51 | 0.093086244 | 0.4359 |
| hCV22272267 | rs3733402 | hCV3230025 | rs3756009 | 0.51 | 0.093086244 | 0.149 |
| hCV22272267 | rs3733402 | hCV3230031 | rs4253419 | 0.51 | 0.093086244 | 0.168 |
| hCV22272267 | rs3733402 | hCV3230038 | rs2289252 | 0.51 | 0.093086244 | 0.1192 |
| hCV22272267 | rs3733402 | hCV3230083 | rs10013653 | 0.51 | 0.093086244 | 0.3018 |
| hCV22272267 | rs3733402 | hCV3230084 | rs7682918 | 0.51 | 0.093086244 | 0.2829 |
| hCV22272267 | rs3733402 | hCV3230094 | rs7687818 | 0.51 | 0.093086244 | 0.4367 |
| hCV22272267 | rs3733402 | hCV3230096 | rs3817184 | 0.51 | 0.093086244 | 0.3722 |
| hCV22272267 | rs3733402 | hCV3230097 | rs3736455 | 0.51 | 0.093086244 | 0.2406 |
| hCV22272267 | rs3733402 | hCV3230101 | rs6835839 | 0.51 | 0.093086244 | 0.3515 |
| hCV22272267 | rs3733402 | hCV3230106 | rs1473597 | 0.51 | 0.093086244 | 0.318 |
| hCV22272267 | rs3733402 | hCV3230110 | rs2276917 | 0.51 | 0.093086244 | 0.3058 |
| hCV22272267 | rs3733402 | hCV3230113 | rs1053094 | 0.51 | 0.093086244 | 0.5831 |
| hCV22272267 | rs3733402 | hCV3230118 | rs4253429 | 0.51 | 0.093086244 | 0.168 |
| hCV22272267 | rs3733402 | hCV3230125 | rs11938564 | 0.51 | 0.093086244 | 0.1034 |
| hCV22272267 | rs3733402 | hCV3230136 | rs13116273 | 0.51 | 0.093086244 | 0.0947 |
| hCV22272267 | rs3733402 | hCV32313006 | rs4253248 | 0.51 | 0.093086244 | 1 |
| hCV22272267 | rs3733402 | hCV32313024 | rs4253239 | 0.51 | 0.093086244 | 0.2444 |
| hCV22272267 | rs3733402 | hCV32358975 | rs4253255 | 0.51 | 0.093086244 | 1 |
| hCV22272267 | rs3733402 | hCV32358984 | rs4253256 | 0.51 | 0.093086244 | 0.6645 |
| hCV22272267 | rs3733402 | hCV7750713 | rs4862596 | 0.51 | 0.093086244 | 0.1067 |
| hCV22272267 | rs3733402 | hCV7750737 | rs13140248 | 0.51 | 0.093086244 | 0.1031 |
| hCV22272267 | rs3733402 | hCV8241630 | rs925451 | 0.51 | 0.093086244 | 0.1476 |
| hCV22272267 | rs3733402 | hCV8241631 | rs1511802 | 0.51 | 0.093086244 | 0.5775 |
| hCV22272267 | rs3733402 | hCV8241632 | rs1511801 | 0.51 | 0.093086244 | 1 |
| hCV22272267 | rs3733402 | hDV68550952 | rs4253289 | 0.51 | 0.093086244 | 0.102 |
| hCV22272267 | rs3733402 | hDV71222711 | rs4253252 | 0.51 | 0.093086244 | 1 |
| hCV22273419 | rs2304167 | hCV11977629 | rs1654459 | 0.51 | 0.488273752 | 0.5665 |
| hCV22273419 | rs2304167 | hCV1376257 | rs10416380 | 0.51 | 0.488273752 | 0.9727 |
| hCV22273419 | rs2304167 | hCV1376262 | rs1671150 | 0.51 | 0.488273752 | 1 |
| hCV22273419 | rs2304167 | hCV1376264 | rs1671151 | 0.51 | 0.488273752 | 1 |
| hCV22273419 | rs2304167 | hCV1376265 | rs1671152 | 0.51 | 0.488273752 | 0.8131 |
| hCV22273419 | rs2304167 | hCV1376266 | rs1654413 | 0.51 | 0.488273752 | 1 |
| hCV22273419 | rs2304167 | hCV1376342 | rs1654416 | 0.51 | 0.488273752 | 0.9724 |
| hCV22273419 | rs2304167 | hCV1376359 | rs2886412 | 0.51 | 0.488273752 | 1 |
| hCV22273419 | rs2304167 | hCV16044361 | rs2569513 | 0.51 | 0.488273752 | 0.639 |
| hCV22273419 | rs2304167 | hCV26895244 | rs1671153 | 0.51 | 0.488273752 | 1 |
| hCV22273419 | rs2304167 | hCV26895257 | rs2886415 | 0.51 | 0.488273752 | 1 |
| hCV22273419 | rs2304167 | hCV29271569 | rs1626971 | 0.51 | 0.488273752 | 0.7325 |
| hCV22273419 | rs2304167 | hCV31722831 | rs11671922 | 0.51 | 0.488273752 | 1 |
| hCV22273419 | rs2304167 | hCV31722832 | rs11084381 | 0.51 | 0.488273752 | 0.8942 |
| hCV22273419 | rs2304167 | hCV31722834 | rs11084382 | 0.51 | 0.488273752 | 0.783 |
| hCV22273419 | rs2304167 | hCV31722835 | rs11668169 | 0.51 | 0.488273752 | 0.8939 |
| hCV22273419 | rs2304167 | hCV31722836 | rs11672026 | 0.51 | 0.488273752 | 0.8884 |
| hCV22273419 | rs2304167 | hCV7841075 | rs1671196 | 0.51 | 0.488273752 | 0.8942 |
| hCV22273419 | rs2304167 | hCV8703249 | rs1654444 | 0.51 | 0.488273752 | 0.633 |
| hCV22273419 | rs2304167 | hCV8717752 | rs1671217 | 0.51 | 0.488273752 | 0.7325 |
| hCV22273419 | rs2304167 | hCV8717761 | rs1654439 | 0.51 | 0.488273752 | 0.5719 |
| hCV22273419 | rs2304167 | hCV8717793 | rs1654433 | 0.51 | 0.488273752 | 0.639 |
| hCV22273419 | rs2304167 | hCV8717794 | rs1654432 | 0.51 | 0.488273752 | 0.639 |
| hCV22273419 | rs2304167 | hCV8717845 | rs892090 | 0.51 | 0.488273752 | 0.7101 |
| hCV22273419 | rs2304167 | hCV8717846 | rs892089 | 0.51 | 0.488273752 | 1 |
| hCV22273419 | rs2304167 | hCV8717871 | rs1654421 | 0.51 | 0.488273752 | 0.754 |
| hCV22273419 | rs2304167 | hCV8717873 | rs1613662 | 0.51 | 0.488273752 | 0.7101 |
| hCV22273419 | rs2304167 | hCV8717881 | rs1654420 | 0.51 | 0.488273752 | 0.8939 |
| hCV22273419 | rs2304167 | hCV8717893 | rs1671192 | 0.51 | 0.488273752 | 1 |
| hCV22273419 | rs2304167 | hCV8718961 | rs1654451 | 0.51 | 0.488273752 | 0.5646 |
| hCV22273419 | rs2304167 | hCV8718972 | rs1654447 | 0.51 | 0.488273752 | 0.6147 |
| hCV22273419 | rs2304167 | hCV9490926 | rs1654419 | 0.51 | 0.488273752 | 0.8939 |
| hCV2303891 | rs1801690 | hCV2658414 | rs8178851 | 0.51 | 0.431588444 | 0.7358 |
| hCV2303891 | rs1801690 | hCV2658416 | rs8178853 | 0.51 | 0.431588444 | 0.7358 |
| hCV2303891 | rs1801690 | hCV2658437 | rs11651658 | 0.51 | 0.431588444 | 0.858 |
| hCV2303891 | rs1801690 | hCV2658444 | rs7209242 | 0.51 | 0.431588444 | 0.497 |
| hCV2303891 | rs1801690 | hCV2658455 | rs11658189 | 0.51 | 0.431588444 | 0.9185 |
| hCV2303891 | rs1801690 | hCV26589423 | rs1014399 | 0.51 | 0.431588444 | 0.574 |
| hCV2303891 | rs1801690 | hCV27842286 | rs8178822 | 0.51 | 0.431588444 | 0.778 |
| hCV2303891 | rs1801690 | hCV29176910 | rs7211380 | 0.51 | 0.431588444 | 0.7358 |
| hCV2303891 | rs1801690 | hCV29577360 | rs9910950 | 0.51 | 0.431588444 | 0.9185 |
| hCV2303891 | rs1801690 | hCV29866571 | rs9891968 | 0.51 | 0.431588444 | 0.8255 |
| hCV2303891 | rs1801690 | hCV29992830 | rs8178839 | 0.51 | 0.431588444 | 0.497 |
| hCV2303891 | rs1801690 | hCV30064665 | rs9902706 | 0.51 | 0.431588444 | 0.9185 |
| hCV2303891 | rs1801690 | hCV30082731 | rs8178838 | 0.51 | 0.431588444 | 0.8247 |
| hCV2303891 | rs1801690 | hCV30118779 | rs8178841 | 0.51 | 0.431588444 | 0.778 |
| hCV2303891 | rs1801690 | hCV30298770 | rs8178842 | 0.51 | 0.431588444 | 0.7215 |
| hCV2303891 | rs1801690 | hCV30352818 | rs8178847 | 0.51 | 0.431588444 | 0.778 |
| hCV2303891 | rs1801690 | hCV30443106 | rs7213041 | 0.51 | 0.431588444 | 0.778 |
| hCV2303891 | rs1801690 | hCV30551147 | rs9908597 | 0.51 | 0.431588444 | 0.8255 |
| hCV2303891 | rs1801690 | hCV31400900 | rs7216660 | 0.51 | 0.431588444 | 0.9185 |
| hCV2303891 | rs1801690 | hDV70764335 | rs16958979 | 0.51 | 0.431588444 | 0.7777 |
| hCV2303891 | rs1801690 | hDV70764357 | rs16959006 | 0.51 | 0.431588444 | 1 |
| hCV233148 | rs1417121 | hCV12073836 | rs1008173 | 0.51 | 0.233111365 | 0.4803 |
| hCV233148 | rs1417121 | hCV12073840 | rs14403 | 0.51 | 0.233111365 | 0.8606 |
| hCV233148 | rs1417121 | hCV15760229 | rs3006939 | 0.51 | 0.233111365 | 0.6414 |
| hCV233148 | rs1417121 | hCV15760238 | rs3006936 | 0.51 | 0.233111365 | 0.6656 |
| hCV233148 | rs1417121 | hCV15760239 | rs3006923 | 0.51 | 0.233111365 | 0.7633 |
| hCV233148 | rs1417121 | hCV15760280 | rs3006940 | 0.51 | 0.233111365 | 0.6414 |
| hCV233148 | rs1417121 | hCV15823024 | rs2125230 | 0.51 | 0.233111365 | 0.4131 |
| hCV233148 | rs1417121 | hCV15885425 | rs2290754 | 0.51 | 0.233111365 | 0.4131 |
| hCV233148 | rs1417121 | hCV15953071 | rs2953329 | 0.51 | 0.233111365 | 0.238 |
| hCV233148 | rs1417121 | hCV15965338 | rs2291410 | 0.51 | 0.233111365 | 0.4485 |
| hCV233148 | rs1417121 | hCV16082410 | rs2881275 | 0.51 | 0.233111365 | 0.4499 |
| hCV233148 | rs1417121 | hCV16189408 | rs2994320 | 0.51 | 0.233111365 | 0.4425 |
| hCV233148 | rs1417121 | hCV1678656 | rs1458024 | 0.51 | 0.233111365 | 0.4499 |
| hCV233148 | rs1417121 | hCV1678674 | rs1458023 | 0.51 | 0.233111365 | 0.4131 |
| hCV233148 | rs1417121 | hCV1678687 | rs320305 | 0.51 | 0.233111365 | 0.3115 |
| hCV233148 | rs1417121 | hCV26034142 | rs9428576 | 0.51 | 0.233111365 | 0.4375 |
| hCV233148 | rs1417121 | hCV26034157 | rs2994329 | 0.51 | 0.233111365 | 0.4814 |
| hCV233148 | rs1417121 | hCV26034158 | rs4515770 | 0.51 | 0.233111365 | 0.6414 |
| hCV233148 | rs1417121 | hCV26034160 | rs2994327 | 0.51 | 0.233111365 | 0.7257 |
| hCV233148 | rs1417121 | hCV26338482 | rs10803143 | 0.51 | 0.233111365 | 0.2626 |
| hCV233148 | rs1417121 | hCV26338512 | rs2994339 | 0.51 | 0.233111365 | 0.4425 |
| hCV233148 | rs1417121 | hCV26338513 | rs3006917 | 0.51 | 0.233111365 | 0.4425 |
| hCV233148 | rs1417121 | hCV26719082 | rs10927046 | 0.51 | 0.233111365 | 0.3102 |
| hCV233148 | rs1417121 | hCV26719085 | rs10927047 | 0.51 | 0.233111365 | 0.3441 |
| hCV233148 | rs1417121 | hCV26719107 | rs7538011 | 0.51 | 0.233111365 | 0.3776 |
| hCV233148 | rs1417121 | hCV26719108 | rs10927035 | 0.51 | 0.233111365 | 0.2612 |
| hCV233148 | rs1417121 | hCV26719113 | rs7517340 | 0.51 | 0.233111365 | 0.3991 |
| hCV233148 | rs1417121 | hCV26719116 | rs10927039 | 0.51 | 0.233111365 | 0.49 |
| hCV233148 | rs1417121 | hCV26719120 | rs10927040 | 0.51 | 0.233111365 | 0.4485 |
| hCV233148 | rs1417121 | hCV26719121 | rs10927041 | 0.51 | 0.233111365 | 0.4485 |
| hCV233148 | rs1417121 | hCV26719149 | rs6675851 | 0.51 | 0.233111365 | 0.4131 |
| hCV233148 | rs1417121 | hCV26719162 | rs4132509 | 0.51 | 0.233111365 | 0.4131 |
| hCV233148 | rs1417121 | hCV26719176 | rs10927076 | 0.51 | 0.233111365 | 0.4131 |
| hCV233148 | rs1417121 | hCV26719192 | rs10803161 | 0.51 | 0.233111365 | 0.4774 |
| hCV233148 | rs1417121 | hCV26719201 | rs4478795 | 0.51 | 0.233111365 | 0.2532 |
| hCV233148 | rs1417121 | hCV26719219 | rs9782958 | 0.51 | 0.233111365 | 0.4131 |
| hCV233148 | rs1417121 | hCV26719222 | rs4553169 | 0.51 | 0.233111365 | 0.4131 |
| hCV233148 | rs1417121 | hCV26719227 | rs10927065 | 0.51 | 0.233111365 | 0.3115 |
| hCV233148 | rs1417121 | hCV26719232 | rs10803158 | 0.51 | 0.233111365 | 0.4131 |
| hCV233148 | rs1417121 | hCV26719233 | rs10927067 | 0.51 | 0.233111365 | 0.4131 |
| hCV233148 | rs1417121 | hCV27498250 | rs3766673 | 0.51 | 0.233111365 | 0.4485 |
| hCV233148 | rs1417121 | hCV29210363 | rs6656918 | 0.51 | 0.233111365 | 0.6414 |
| hCV233148 | rs1417121 | hCV29542869 | rs7534117 | 0.51 | 0.233111365 | 0.4131 |
| hCV233148 | rs1417121 | hCV29560960 | rs7519673 | 0.51 | 0.233111365 | 0.3115 |
| hCV233148 | rs1417121 | hCV29741723 | rs7517921 | 0.51 | 0.233111365 | 0.3711 |
| hCV233148 | rs1417121 | hCV29994467 | rs6694738 | 0.51 | 0.233111365 | 0.3776 |
| hCV233148 | rs1417121 | hCV30084348 | rs9287269 | 0.51 | 0.233111365 | 0.4111 |
| hCV233148 | rs1417121 | hCV30372886 | rs9782883 | 0.51 | 0.233111365 | 0.4131 |
| hCV233148 | rs1417121 | hCV30382231 | rs9428966 | 0.51 | 0.233111365 | 1 |
| hCV233148 | rs1417121 | hCV30690777 | rs12045585 | 0.51 | 0.233111365 | 0.3015 |
| hCV233148 | rs1417121 | hCV30690778 | rs12140414 | 0.51 | 0.233111365 | 0.5616 |
| hCV233148 | rs1417121 | hCV30690780 | rs10737888 | 0.51 | 0.233111365 | 0.6414 |
| hCV233148 | rs1417121 | hCV30690784 | rs4658574 | 0.51 | 0.233111365 | 0.7257 |
| hCV233148 | rs1417121 | hCV31056133 | rs10927006 | 0.51 | 0.233111365 | 0.2564 |
| hCV233148 | rs1417121 | hCV31056162 | rs12049318 | 0.51 | 0.233111365 | 0.2564 |
| hCV233148 | rs1417121 | hCV31523557 | rs10754807 | 0.51 | 0.233111365 | 0.4131 |
| hCV233148 | rs1417121 | hCV31523563 | rs10927051 | 0.51 | 0.233111365 | 0.4633 |
| hCV233148 | rs1417121 | hCV31523638 | rs12037013 | 0.51 | 0.233111365 | 0.3441 |
| hCV233148 | rs1417121 | hCV31523639 | rs12034588 | 0.51 | 0.233111365 | 0.4326 |
| hCV233148 | rs1417121 | hCV31523643 | rs6671475 | 0.51 | 0.233111365 | 0.4485 |
| hCV233148 | rs1417121 | hCV31523650 | rs12048930 | 0.51 | 0.233111365 | 0.3711 |
| hCV233148 | rs1417121 | hCV31523658 | rs12047209 | 0.51 | 0.233111365 | 0.317 |
| hCV233148 | rs1417121 | hCV31523688 | rs12049228 | 0.51 | 0.233111365 | 0.4351 |
| hCV233148 | rs1417121 | hCV31523691 | rs12021907 | 0.51 | 0.233111365 | 0.3115 |
| hCV233148 | rs1417121 | hCV31523707 | rs10803152 | 0.51 | 0.233111365 | 0.3441 |
| hCV233148 | rs1417121 | hCV31523710 | rs10927059 | 0.51 | 0.233111365 | 0.4131 |
| hCV233148 | rs1417121 | hCV31523723 | rs12140040 | 0.51 | 0.233111365 | 0.3202 |
| hCV233148 | rs1417121 | hCV31523736 | rs12124113 | 0.51 | 0.233111365 | 0.3115 |
| hCV233148 | rs1417121 | hCV31523740 | rs12032342 | 0.51 | 0.233111365 | 0.4499 |
| hCV233148 | rs1417121 | hCV31523744 | rs12031994 | 0.51 | 0.233111365 | 0.3115 |
| hCV233148 | rs1417121 | hCV804126 | rs320320 | 0.51 | 0.233111365 | 0.4499 |
| hCV233148 | rs1417121 | hCV8688079 | rs884808 | 0.51 | 0.233111365 | 0.7257 |
| hCV233148 | rs1417121 | hCV8688080 | rs884328 | 0.51 | 0.233111365 | 0.7257 |
| hCV233148 | rs1417121 | hCV8688111 | rs1578275 | 0.51 | 0.233111365 | 0.5616 |
| hCV233148 | rs1417121 | hCV9493073 | rs1058305 | 0.51 | 0.233111365 | 1 |
| hCV233148 | rs1417121 | hCV9493081 | rs1058304 | 0.51 | 0.233111365 | 1 |
| hCV233148 | rs1417121 | hCV97631 | rs1538773 | 0.51 | 0.233111365 | 0.6414 |
| hCV233148 | rs1417121 | hDV71836703 | rs6429433 | 0.51 | 0.233111365 | 0.4157 |
| hCV233148 | rs1417121 | hDV90784784 | rs320339 | 0.51 | 0.233111365 | 0.3409 |
| hCV2442143 | rs12544854 | hCV15753018 | rs2299606 | 0.51 | 0.805894186 | 0.9649 |
| hCV2442143 | rs12544854 | hCV15844343 | rs2427746 | 0.51 | 0.805894186 | 0.8982 |
| hCV2442143 | rs12544854 | hCV2442136 | rs12155668 | 0.51 | 0.805894186 | 1 |
| hCV2442143 | rs12544854 | hCV2442137 | rs12155885 | 0.51 | 0.805894186 | 1 |
| hCV2442143 | rs12544854 | hCV2442146 | rs966118 | 0.51 | 0.805894186 | 1 |
| hCV2442143 | rs12544854 | hCV2442155 | rs3753117 | 0.51 | 0.805894186 | 1 |
| hCV2442143 | rs12544854 | hCV2442156 | rs35573135 | 0.51 | 0.805894186 | 0.841 |
| hCV2442143 | rs12544854 | hCV26696706 | rs2299607 | 0.51 | 0.805894186 | 1 |
| hCV2442143 | rs12544854 | hCV27474371 | rs3753116 | 0.51 | 0.805894186 | 1 |
| hCV2442143 | rs12544854 | hCV31495915 | rs3753115 | 0.51 | 0.805894186 | 1 |
| hCV2442143 | rs12544854 | hCV31495928 | rs12548139 | 0.51 | 0.805894186 | 1 |
| hCV2442143 | rs12544854 | hCV8947815 | rs1049874 | 0.51 | 0.805894186 | 1 |
| hCV2499170 | rs169713 | hCV2238240 | rs209773 | 0.51 | 0.626344353 | 0.9402 |
| hCV2499170 | rs169713 | hCV2238245 | rs23805 | 0.51 | 0.626344353 | 0.8916 |
| hCV2499170 | rs169713 | hCV2238247 | rs209778 | 0.51 | 0.626344353 | 0.6678 |
| hCV2499170 | rs169713 | hCV2238250 | rs209780 | 0.51 | 0.626344353 | 0.8809 |
| hCV2499170 | rs169713 | hCV2238261 | rs209814 | 0.51 | 0.626344353 | 0.6439 |
| hCV2499170 | rs169713 | hCV2238263 | rs209812 | 0.51 | 0.626344353 | 0.6422 |
| hCV2499170 | rs169713 | hCV2499165 | rs209774 | 0.51 | 0.626344353 | 1 |
| hCV2499170 | rs169713 | hCV2499169 | rs85219 | 0.51 | 0.626344353 | 1 |
| hCV2499170 | rs169713 | hCV2499176 | rs9380643 | 0.51 | 0.626344353 | 0.6493 |
| hCV2499170 | rs169713 | hCV2499198 | rs1205883 | 0.51 | 0.626344353 | 0.6439 |
| hCV2499170 | rs169713 | hCV2499199 | rs1205884 | 0.51 | 0.626344353 | 0.6439 |
| hCV2499170 | rs169713 | hCV2499201 | rs1205887 | 0.51 | 0.626344353 | 0.6439 |
| hCV2499170 | rs169713 | hCV31001553 | rs10947661 | 0.51 | 0.626344353 | 0.8779 |
| hCV2499170 | rs169713 | hCV7465311 | rs1205863 | 0.51 | 0.626344353 | 0.6439 |
| hCV2499170 | rs169713 | hCV7465312 | rs864245 | 0.51 | 0.626344353 | 0.6439 |
| hCV2499170 | rs169713 | hCV7465347 | rs1205852 | 0.51 | 0.626344353 | 0.6439 |
| hCV2499170 | rs169713 | hCV7465349 | rs1205850 | 0.51 | 0.626344353 | 0.8424 |
| hCV2499170 | rs169713 | hCV7465354 | rs1205849 | 0.51 | 0.626344353 | 0.8932 |
| hCV2499170 | rs169713 | hCV7465364 | rs864244 | 0.51 | 0.626344353 | 0.9459 |
| hCV2499170 | rs169713 | hCV7465377 | rs1210621 | 0.51 | 0.626344353 | 0.9438 |
| hCV2499170 | rs169713 | hCV7465418 | rs876828 | 0.51 | 0.626344353 | 0.7396 |
| hCV2499170 | rs169713 | hDV101721202 | rs9394412 | 0.51 | 0.626344353 | 0.8779 |
| hCV2532034 | rs6003 | hCV11888484 | rs6694672 | 0.51 | 0.719447218 | 0.9425 |
| hCV2532034 | rs6003 | hCV11888496 | rs7554757 | 0.51 | 0.719447218 | 1 |
| hCV2532034 | rs6003 | hCV11888533 | rs1115247 | 0.51 | 0.719447218 | 1 |
| hCV2532034 | rs6003 | hCV11888556 | rs7542397 | 0.51 | 0.719447218 | 1 |
| hCV2532034 | rs6003 | hCV11888566 | rs1888991 | 0.51 | 0.719447218 | 0.9451 |
| hCV2532034 | rs6003 | hCV15832928 | rs2151133 | 0.51 | 0.719447218 | 0.8803 |
| hCV2532034 | rs6003 | hCV15832929 | rs2151134 | 0.51 | 0.719447218 | 1 |
| hCV2532034 | rs6003 | hCV1648949 | rs6692162 | 0.51 | 0.719447218 | 1 |
| hCV2532034 | rs6003 | hCV1739697 | rs10429911 | 0.51 | 0.719447218 | 0.8913 |
| hCV2532034 | rs6003 | hCV1739698 | rs1415217 | 0.51 | 0.719447218 | 0.8913 |
| hCV2532034 | rs6003 | hCV1739699 | rs7520503 | 0.51 | 0.719447218 | 0.945 |
| hCV2532034 | rs6003 | hCV1739712 | rs510135 | 0.51 | 0.719447218 | 0.8913 |
| hCV2532034 | rs6003 | hCV1742489 | rs476390 | 0.51 | 0.719447218 | 0.8913 |
| hCV2532034 | rs6003 | hCV1742520 | rs615647 | 0.51 | 0.719447218 | 0.8913 |
| hCV2532034 | rs6003 | hCV1742521 | rs518149 | 0.51 | 0.719447218 | 0.8913 |
| hCV2532034 | rs6003 | hCV1742540 | rs10754219 | 0.51 | 0.719447218 | 0.8802 |
| hCV2532034 | rs6003 | hCV201028 | rs10733087 | 0.51 | 0.719447218 | 0.8803 |
| hCV2532034 | rs6003 | hCV201029 | rs10754213 | 0.51 | 0.719447218 | 0.9425 |
| hCV2532034 | rs6003 | hCV209646 | rs12734260 | 0.51 | 0.719447218 | 0.8013 |
| hCV2532034 | rs6003 | hCV240531 | rs6703400 | 0.51 | 0.719447218 | 1 |
| hCV2532034 | rs6003 | hCV240532 | rs2026429 | 0.51 | 0.719447218 | 1 |
| hCV2532034 | rs6003 | hCV247773 | rs1332663 | 0.51 | 0.719447218 | 1 |
| hCV2532034 | rs6003 | hCV2532031 | rs1412632 | 0.51 | 0.719447218 | 1 |
| hCV2532034 | rs6003 | hCV2532032 | rs4915148 | 0.51 | 0.719447218 | 1 |
| hCV2532034 | rs6003 | hCV2532033 | rs1759006 | 0.51 | 0.719447218 | 1 |
| hCV2532034 | rs6003 | hCV2532038 | rs1759008 | 0.51 | 0.719447218 | 1 |
| hCV2532034 | rs6003 | hCV2532039 | rs1759009 | 0.51 | 0.719447218 | 1 |
| hCV2532034 | rs6003 | hCV2532061 | rs857021 | 0.51 | 0.719447218 | 0.9424 |
| hCV2532034 | rs6003 | hCV2532062 | rs1332669 | 0.51 | 0.719447218 | 0.9425 |
| hCV2532034 | rs6003 | hCV26753641 | rs10801590 | 0.51 | 0.719447218 | 1 |
| hCV2532034 | rs6003 | hCV268763 | rs4350226 | 0.51 | 0.719447218 | 0.8913 |
| hCV2532034 | rs6003 | hCV26961419 | rs10732296 | 0.51 | 0.719447218 | 0.8913 |
| hCV2532034 | rs6003 | hCV26961484 | rs4915379 | 0.51 | 0.719447218 | 0.945 |
| hCV2532034 | rs6003 | hCV2759661 | rs12731209 | 0.51 | 0.719447218 | 1 |
| hCV2532034 | rs6003 | hCV2759662 | rs1170880 | 0.51 | 0.719447218 | 0.9395 |
| hCV2532034 | rs6003 | hCV2759663 | rs928440 | 0.51 | 0.719447218 | 1 |
| hCV2532034 | rs6003 | hCV2759664 | rs928439 | 0.51 | 0.719447218 | 1 |
| hCV2532034 | rs6003 | hCV2759671 | rs2336595 | 0.51 | 0.719447218 | 1 |
| hCV2532034 | rs6003 | hCV2759673 | rs1412639 | 0.51 | 0.719447218 | 1 |
| hCV2532034 | rs6003 | hCV2759676 | rs4915156 | 0.51 | 0.719447218 | 0.8803 |
| hCV2532034 | rs6003 | hCV2759677 | rs10801588 | 0.51 | 0.719447218 | 0.8486 |
| hCV2532034 | rs6003 | hCV2759678 | rs1571964 | 0.51 | 0.719447218 | 1 |
| hCV2532034 | rs6003 | hCV2759679 | rs6677082 | 0.51 | 0.719447218 | 1 |
| hCV2532034 | rs6003 | hCV2759685 | rs877897 | 0.51 | 0.719447218 | 1 |
| hCV2532034 | rs6003 | hCV2759688 | rs10922169 | 0.51 | 0.719447218 | 1 |
| hCV2532034 | rs6003 | hCV2759691 | rs4915337 | 0.51 | 0.719447218 | 1 |
| hCV2532034 | rs6003 | hCV2759693 | rs10754215 | 0.51 | 0.719447218 | 1 |
| hCV2532034 | rs6003 | hCV2759696 | rs7411719 | 0.51 | 0.719447218 | 1 |
| hCV2532034 | rs6003 | hCV2759703 | rs1412640 | 0.51 | 0.719447218 | 1 |
| hCV2532034 | rs6003 | hCV2759704 | rs1953064 | 0.51 | 0.719447218 | 0.8803 |
| hCV2532034 | rs6003 | hCV2759709 | rs4915313 | 0.51 | 0.719447218 | 1 |
| hCV2532034 | rs6003 | hCV2759711 | rs4915309 | 0.51 | 0.719447218 | 1 |
| hCV2532034 | rs6003 | hCV2759725 | rs6670056 | 0.51 | 0.719447218 | 1 |
| hCV2532034 | rs6003 | hCV27898326 | rs4915316 | 0.51 | 0.719447218 | 0.9396 |
| hCV2532034 | rs6003 | hCV27898327 | rs4915327 | 0.51 | 0.719447218 | 1 |
| hCV2532034 | rs6003 | hCV28005188 | rs4342879 | 0.51 | 0.719447218 | 0.8913 |
| hCV2532034 | rs6003 | hCV29222813 | rs4915315 | 0.51 | 0.719447218 | 0.8023 |
| hCV2532034 | rs6003 | hCV29222814 | rs6428387 | 0.51 | 0.719447218 | 0.8803 |
| hCV2532034 | rs6003 | hCV29222817 | rs6656858 | 0.51 | 0.719447218 | 1 |
| hCV2532034 | rs6003 | hCV29295007 | rs6656448 | 0.51 | 0.719447218 | 0.88 |
| hCV2532034 | rs6003 | hCV29491389 | rs7513826 | 0.51 | 0.719447218 | 0.8913 |
| hCV2532034 | rs6003 | hCV29633649 | rs7539642 | 0.51 | 0.719447218 | 0.8803 |
| hCV2532034 | rs6003 | hCV29724082 | rs9427661 | 0.51 | 0.719447218 | 0.9425 |
| hCV2532034 | rs6003 | hCV29796191 | rs9427660 | 0.51 | 0.719447218 | 1 |
| hCV2532034 | rs6003 | hCV29904681 | rs6680497 | 0.51 | 0.719447218 | 1 |
| hCV2532034 | rs6003 | hCV29922678 | rs9427940 | 0.51 | 0.719447218 | 0.8911 |
| hCV2532034 | rs6003 | hCV30321245 | rs7523013 | 0.51 | 0.719447218 | 0.8913 |
| hCV2532034 | rs6003 | hCV30373286 | rs6702340 | 0.51 | 0.719447218 | 1 |
| hCV2532034 | rs6003 | hCV30391085 | rs9427656 | 0.51 | 0.719447218 | 0.7282 |
| hCV2532034 | rs6003 | hCV30391086 | rs9427942 | 0.51 | 0.719447218 | 0.9396 |
| hCV2532034 | rs6003 | hCV30589276 | rs9427657 | 0.51 | 0.719447218 | 0.7525 |
| hCV2532034 | rs6003 | hCV3091554 | rs5997 | 0.51 | 0.719447218 | 1 |
| hCV2532034 | rs6003 | hCV31565477 | rs10801587 | 0.51 | 0.719447218 | 0.8802 |
| hCV2532034 | rs6003 | hCV31565478 | rs10754214 | 0.51 | 0.719447218 | 0.9425 |
| hCV2532034 | rs6003 | hCV31565485 | rs10922166 | 0.51 | 0.719447218 | 1 |
| hCV2532034 | rs6003 | hCV31565488 | rs6671696 | 0.51 | 0.719447218 | 1 |
| hCV2532034 | rs6003 | hCV31565509 | rs12092294 | 0.51 | 0.719447218 | 0.9425 |
| hCV2532034 | rs6003 | hCV31565527 | rs12039586 | 0.51 | 0.719447218 | 1 |
| hCV2532034 | rs6003 | hCV31795582 | rs6678066 | 0.51 | 0.719447218 | 0.8913 |
| hCV2532034 | rs6003 | hCV32375831 | rs4915378 | 0.51 | 0.719447218 | 0.7347 |
| hCV2532034 | rs6003 | hCV356522 | rs10732295 | 0.51 | 0.719447218 | 0.9451 |
| hCV2532034 | rs6003 | hCV406628 | rs1576879 | 0.51 | 0.719447218 | 1 |
| hCV2532034 | rs6003 | hCV489039 | rs6679189 | 0.51 | 0.719447218 | 1 |
| hCV2532034 | rs6003 | hCV65774 | rs7534353 | 0.51 | 0.719447218 | 1 |
| hCV2532034 | rs6003 | hCV8348876 | rs1332662 | 0.51 | 0.719447218 | 1 |
| hCV2532034 | rs6003 | hCV8350834 | rs1764629 | 0.51 | 0.719447218 | 0.9451 |
| hCV2532034 | rs6003 | hCV8350843 | rs1556763 | 0.51 | 0.719447218 | 0.945 |
| hCV2532034 | rs6003 | hCV8356383 | rs1764800 | 0.51 | 0.719447218 | 0.945 |
| hCV2532034 | rs6003 | hCV8356417 | rs12677 | 0.51 | 0.719447218 | 1 |
| hCV2532034 | rs6003 | hCV8356418 | rs1537319 | 0.51 | 0.719447218 | 0.8803 |
| hCV2532034 | rs6003 | hCV8356419 | rs1412631 | 0.51 | 0.719447218 | 1 |
| hCV2532034 | rs6003 | hCV8356425 | rs1627765 | 0.51 | 0.719447218 | 0.9451 |
| hCV2532034 | rs6003 | hCV8356430 | rs1759007 | 0.51 | 0.719447218 | 1 |
| hCV2532034 | rs6003 | hCV8356446 | rs1412634 | 0.51 | 0.719447218 | 1 |
| hCV2532034 | rs6003 | hCV8356520 | rs1170881 | 0.51 | 0.719447218 | 1 |
| hCV2532034 | rs6003 | hCV836489 | rs616675 | 0.51 | 0.719447218 | 0.8903 |
| hCV2532034 | rs6003 | hCV87892 | rs2336597 | 0.51 | 0.719447218 | 0.9425 |
| hCV2532034 | rs6003 | hCV9114466 | rs3891964 | 0.51 | 0.719447218 | 0.9425 |
| hCV2532034 | rs6003 | hCV9114630 | rs1576880 | 0.51 | 0.719447218 | 1 |
| hCV2532034 | rs6003 | hCV9114656 | rs9427662 | 0.51 | 0.719447218 | 0.9425 |
| hCV2532034 | rs6003 | hCV9114658 | rs13376702 | 0.51 | 0.719447218 | 0.7419 |
| hCV25474413 | rs3822057 | hCV11786147 | rs4862662 | 0.51 | 0.057574841 | 0.2412 |
| hCV25474413 | rs3822057 | hCV11786258 | rs4253303 | 0.51 | 0.057574841 | 0.2622 |
| hCV25474413 | rs3822057 | hCV11786259 | rs4253304 | 0.51 | 0.057574841 | 0.2992 |
| hCV25474413 | rs3822057 | hCV11786295 | rs4253421 | 0.51 | 0.057574841 | 0.0942 |
| hCV25474413 | rs3822057 | hCV11786301 | rs5970 | 0.51 | 0.057574841 | 0.0764 |
| hCV25474413 | rs3822057 | hCV11786307 | rs1062547 | 0.51 | 0.057574841 | 0.4723 |
| hCV25474413 | rs3822057 | hCV11786311 | rs13145616 | 0.51 | 0.057574841 | 0.0838 |
| hCV25474413 | rs3822057 | hCV11786327 | rs13133050 | 0.51 | 0.057574841 | 0.2298 |
| hCV25474413 | rs3822057 | hCV12066116 | rs1877320 | 0.51 | 0.057574841 | 0.1289 |
| hCV25474413 | rs3822057 | hCV12066118 | rs2048 | 0.51 | 0.057574841 | 0.3088 |
| hCV25474413 | rs3822057 | hCV12066119 | rs1912826 | 0.51 | 0.057574841 | 0.3323 |
| hCV25474413 | rs3822057 | hCV12066124 | rs2036914 | 0.51 | 0.057574841 | 0.9449 |
| hCV25474413 | rs3822057 | hCV12066129 | rs1593 | 0.51 | 0.057574841 | 0.1397 |
| hCV25474413 | rs3822057 | hCV12086148 | rs1877321 | 0.51 | 0.057574841 | 0.0612 |
| hCV25474413 | rs3822057 | hCV15793897 | rs3087505 | 0.51 | 0.057574841 | 0.1042 |
| hCV25474413 | rs3822057 | hCV15811716 | rs2102575 | 0.51 | 0.057574841 | 0.0982 |
| hCV25474413 | rs3822057 | hCV15968025 | rs2292425 | 0.51 | 0.057574841 | 0.169 |
| hCV25474413 | rs3822057 | hCV15968026 | rs2292426 | 0.51 | 0.057574841 | 0.1853 |
| hCV25474413 | rs3822057 | hCV15968034 | rs2292428 | 0.51 | 0.057574841 | 0.1541 |
| hCV25474413 | rs3822057 | hCV15968043 | rs2292423 | 0.51 | 0.057574841 | 0.313 |
| hCV25474413 | rs3822057 | hCV15975109 | rs2304596 | 0.51 | 0.057574841 | 0.0626 |
| hCV25474413 | rs3822057 | hCV16172925 | rs2241818 | 0.51 | 0.057574841 | 0.0581 |
| hCV25474413 | rs3822057 | hCV16172935 | rs2241817 | 0.51 | 0.057574841 | 0.4618 |
| hCV25474413 | rs3822057 | hCV2103343 | rs4241824 | 0.51 | 0.057574841 | 0.9811 |
| hCV25474413 | rs3822057 | hCV2103375 | rs12502630 | 0.51 | 0.057574841 | 0.0598 |
| hCV25474413 | rs3822057 | hCV2103388 | rs4613610 | 0.51 | 0.057574841 | 0.1442 |
| hCV25474413 | rs3822057 | hCV2103391 | rs1008728 | 0.51 | 0.057574841 | 0.2797 |
| hCV25474413 | rs3822057 | hCV2103392 | rs12500826 | 0.51 | 0.057574841 | 0.4611 |
| hCV25474413 | rs3822057 | hCV2103402 | rs9993749 | 0.51 | 0.057574841 | 0.0612 |
| hCV25474413 | rs3822057 | hCV22272267 | rs3733402 | 0.51 | 0.057574841 | 0.312 |
| hCV25474413 | rs3822057 | hCV25474414 | rs4253399 | 0.51 | 0.057574841 | 0.596 |
| hCV25474413 | rs3822057 | hCV25634763 | rs4253241 | 0.51 | 0.057574841 | 0.0739 |
| hCV25474413 | rs3822057 | hCV25988221 | rs9995366 | 0.51 | 0.057574841 | 0.0873 |
| hCV25474413 | rs3822057 | hCV25990131 | rs13146272 | 0.51 | 0.057574841 | 0.1706 |
| hCV25474413 | rs3822057 | hCV26038139 | rs4253405 | 0.51 | 0.057574841 | 0.6414 |
| hCV25474413 | rs3822057 | hCV26265231 | rs7684025 | 0.51 | 0.057574841 | 0.2834 |
| hCV25474413 | rs3822057 | hCV27309991 | rs4572916 | 0.51 | 0.057574841 | 0.1491 |
| hCV25474413 | rs3822057 | hCV27473099 | rs3733403 | 0.51 | 0.057574841 | 0.1093 |
| hCV25474413 | rs3822057 | hCV27474895 | rs3756011 | 0.51 | 0.057574841 | 0.5232 |
| hCV25474413 | rs3822057 | hCV27477533 | rs3756008 | 0.51 | 0.057574841 | 0.577 |
| hCV25474413 | rs3822057 | hCV27482765 | rs3775301 | 0.51 | 0.057574841 | 0.0626 |
| hCV25474413 | rs3822057 | hCV27490984 | rs3822058 | 0.51 | 0.057574841 | 0.477 |
| hCV25474413 | rs3822057 | hCV27521729 | rs3822056 | 0.51 | 0.057574841 | 0.1222 |
| hCV25474413 | rs3822057 | hCV27902803 | rs4862665 | 0.51 | 0.057574841 | 0.0873 |
| hCV25474413 | rs3822057 | hCV27902808 | rs4253236 | 0.51 | 0.057574841 | 0.1514 |
| hCV25474413 | rs3822057 | hCV28960679 | rs6844764 | 0.51 | 0.057574841 | 0.1108 |
| hCV25474413 | rs3822057 | hCV29053261 | rs6842047 | 0.51 | 0.057574841 | 0.1042 |
| hCV25474413 | rs3822057 | hCV29053264 | rs7667777 | 0.51 | 0.057574841 | 0.2192 |
| hCV25474413 | rs3822057 | hCV29053265 | rs4253244 | 0.51 | 0.057574841 | 0.1369 |
| hCV25474413 | rs3822057 | hCV29640635 | rs10029715 | 0.51 | 0.057574841 | 0.0904 |
| hCV25474413 | rs3822057 | hCV29718000 | rs4253238 | 0.51 | 0.057574841 | 0.3736 |
| hCV25474413 | rs3822057 | hCV29826351 | rs10025990 | 0.51 | 0.057574841 | 0.1507 |
| hCV25474413 | rs3822057 | hCV29877725 | rs4253295 | 0.51 | 0.057574841 | 0.2932 |
| hCV25474413 | rs3822057 | hCV30307525 | rs10025152 | 0.51 | 0.057574841 | 0.0904 |
| hCV25474413 | rs3822057 | hCV30492573 | rs10471184 | 0.51 | 0.057574841 | 0.1042 |
| hCV25474413 | rs3822057 | hCV30562347 | rs4253418 | 0.51 | 0.057574841 | 0.0597 |
| hCV25474413 | rs3822057 | hCV30983902 | rs4862668 | 0.51 | 0.057574841 | 0.1289 |
| hCV25474413 | rs3822057 | hCV30983907 | rs4253246 | 0.51 | 0.057574841 | 0.0739 |
| hCV25474413 | rs3822057 | hCV30983927 | rs6552962 | 0.51 | 0.057574841 | 0.0626 |
| hCV25474413 | rs3822057 | hCV32209629 | rs12715865 | 0.51 | 0.057574841 | 0.1687 |
| hCV25474413 | rs3822057 | hCV32209636 | rs11132387 | 0.51 | 0.057574841 | 0.4496 |
| hCV25474413 | rs3822057 | hCV32209637 | rs13143773 | 0.51 | 0.057574841 | 0.302 |
| hCV25474413 | rs3822057 | hCV32209638 | rs12507040 | 0.51 | 0.057574841 | 0.3609 |
| hCV25474413 | rs3822057 | hCV32291217 | rs4253323 | 0.51 | 0.057574841 | 0.0626 |
| hCV25474413 | rs3822057 | hCV32291256 | rs4253406 | 0.51 | 0.057574841 | 0.0668 |
| hCV25474413 | rs3822057 | hCV32291269 | rs4253417 | 0.51 | 0.057574841 | 0.419 |
| hCV25474413 | rs3822057 | hCV32291286 | rs4253422 | 0.51 | 0.057574841 | 0.2386 |
| hCV25474413 | rs3822057 | hCV32291287 | rs4253423 | 0.51 | 0.057574841 | 0.2386 |
| hCV25474413 | rs3822057 | hCV32291295 | rs4253292 | 0.51 | 0.057574841 | 0.1106 |
| hCV25474413 | rs3822057 | hCV32291301 | rs4253302 | 0.51 | 0.057574841 | 0.0583 |
| hCV25474413 | rs3822057 | hCV32295028 | rs4253260 | 0.51 | 0.057574841 | 0.0626 |
| hCV25474413 | rs3822057 | hCV3229991 | rs4241815 | 0.51 | 0.057574841 | 0.312 |
| hCV25474413 | rs3822057 | hCV3229992 | rs3775298 | 0.51 | 0.057574841 | 0.312 |
| hCV25474413 | rs3822057 | hCV3229995 | rs11132382 | 0.51 | 0.057574841 | 0.3554 |
| hCV25474413 | rs3822057 | hCV3230000 | rs4253294 | 0.51 | 0.057574841 | 0.1258 |
| hCV25474413 | rs3822057 | hCV3230001 | rs4253296 | 0.51 | 0.057574841 | 0.0739 |
| hCV25474413 | rs3822057 | hCV3230002 | rs4253297 | 0.51 | 0.057574841 | 0.2517 |
| hCV25474413 | rs3822057 | hCV3230003 | rs2304595 | 0.51 | 0.057574841 | 0.3609 |
| hCV25474413 | rs3822057 | hCV3230004 | rs4253301 | 0.51 | 0.057574841 | 0.0995 |
| hCV25474413 | rs3822057 | hCV3230006 | rs4253308 | 0.51 | 0.057574841 | 0.2932 |
| hCV25474413 | rs3822057 | hCV3230007 | rs4253311 | 0.51 | 0.057574841 | 0.312 |
| hCV25474413 | rs3822057 | hCV3230011 | rs4253320 | 0.51 | 0.057574841 | 0.2517 |
| hCV25474413 | rs3822057 | hCV3230013 | rs3775303 | 0.51 | 0.057574841 | 0.2992 |
| hCV25474413 | rs3822057 | hCV3230014 | rs4861709 | 0.51 | 0.057574841 | 0.1258 |
| hCV25474413 | rs3822057 | hCV3230017 | rs4253327 | 0.51 | 0.057574841 | 0.0594 |
| hCV25474413 | rs3822057 | hCV3230018 | rs925453 | 0.51 | 0.057574841 | 0.1356 |
| hCV25474413 | rs3822057 | hCV3230019 | rs4253332 | 0.51 | 0.057574841 | 0.1286 |
| hCV25474413 | rs3822057 | hCV3230021 | rs13135645 | 0.51 | 0.057574841 | 0.1443 |
| hCV25474413 | rs3822057 | hCV3230022 | rs11132383 | 0.51 | 0.057574841 | 0.1929 |
| hCV25474413 | rs3822057 | hCV3230025 | rs3756009 | 0.51 | 0.057574841 | 0.6037 |
| hCV25474413 | rs3822057 | hCV3230030 | rs4253408 | 0.51 | 0.057574841 | 0.0716 |
| hCV25474413 | rs3822057 | hCV3230031 | rs4253419 | 0.51 | 0.057574841 | 0.2386 |
| hCV25474413 | rs3822057 | hCV3230032 | rs5974 | 0.51 | 0.057574841 | 0.0838 |
| hCV25474413 | rs3822057 | hCV3230038 | rs2289252 | 0.51 | 0.057574841 | 0.4122 |
| hCV25474413 | rs3822057 | hCV3230083 | rs10013653 | 0.51 | 0.057574841 | 0.3369 |
| hCV25474413 | rs3822057 | hCV3230084 | rs7682918 | 0.51 | 0.057574841 | 0.2521 |
| hCV25474413 | rs3822057 | hCV3230094 | rs7687818 | 0.51 | 0.057574841 | 0.3057 |
| hCV25474413 | rs3822057 | hCV3230096 | rs3817184 | 0.51 | 0.057574841 | 0.2412 |
| hCV25474413 | rs3822057 | hCV3230097 | rs3736455 | 0.51 | 0.057574841 | 0.2152 |
| hCV25474413 | rs3822057 | hCV3230101 | rs6835839 | 0.51 | 0.057574841 | 0.0843 |
| hCV25474413 | rs3822057 | hCV3230106 | rs1473597 | 0.51 | 0.057574841 | 0.1509 |
| hCV25474413 | rs3822057 | hCV3230110 | rs2276917 | 0.51 | 0.057574841 | 0.1608 |
| hCV25474413 | rs3822057 | hCV3230113 | rs1053094 | 0.51 | 0.057574841 | 0.2648 |
| hCV25474413 | rs3822057 | hCV3230118 | rs4253429 | 0.51 | 0.057574841 | 0.2386 |
| hCV25474413 | rs3822057 | hCV3230119 | rs4253430 | 0.51 | 0.057574841 | 0.4654 |
| hCV25474413 | rs3822057 | hCV3230121 | rs4253431 | 0.51 | 0.057574841 | 0.0838 |
| hCV25474413 | rs3822057 | hCV3230125 | rs11938564 | 0.51 | 0.057574841 | 0.2911 |
| hCV25474413 | rs3822057 | hCV3230131 | rs13136269 | 0.51 | 0.057574841 | 0.3609 |
| hCV25474413 | rs3822057 | hCV3230133 | rs12511874 | 0.51 | 0.057574841 | 0.3083 |
| hCV25474413 | rs3822057 | hCV3230134 | rs12500151 | 0.51 | 0.057574841 | 0.3453 |
| hCV25474413 | rs3822057 | hCV3230136 | rs13116273 | 0.51 | 0.057574841 | 0.3534 |
| hCV25474413 | rs3822057 | hCV32313006 | rs4253248 | 0.51 | 0.057574841 | 0.3617 |
| hCV25474413 | rs3822057 | hCV32313007 | rs4862666 | 0.51 | 0.057574841 | 0.0873 |
| hCV25474413 | rs3822057 | hCV32313024 | rs4253239 | 0.51 | 0.057574841 | 0.1106 |
| hCV25474413 | rs3822057 | hCV32358975 | rs4253255 | 0.51 | 0.057574841 | 0.2992 |
| hCV25474413 | rs3822057 | hCV32358984 | rs4253256 | 0.51 | 0.057574841 | 0.1464 |
| hCV25474413 | rs3822057 | hCV8241628 | rs907439 | 0.51 | 0.057574841 | 0.1491 |
| hCV25474413 | rs3822057 | hCV8241630 | rs925451 | 0.51 | 0.057574841 | 0.596 |
| hCV25474413 | rs3822057 | hCV8241631 | rs1511802 | 0.51 | 0.057574841 | 0.3119 |
| hCV25474413 | rs3822057 | hCV8241632 | rs1511801 | 0.51 | 0.057574841 | 0.3142 |
| hCV25474413 | rs3822057 | hCV8241633 | rs1511800 | 0.51 | 0.057574841 | 0.0873 |
| hCV25474413 | rs3822057 | hDV71222711 | rs4253252 | 0.51 | 0.057574841 | 0.3617 |
| hCV25597241 | rs3782320 | hCV15835026 | rs2878772 | 0.51 | 0.904876352 | 1 |
| hCV25597241 | rs3782320 | hCV27481297 | rs3782318 | 0.51 | 0.904876352 | 1 |
| hCV25597241 | rs3782320 | hDV70885868 | rs17124174 | 0.51 | 0.904876352 | 1 |
| hCV25597241 | rs3782320 | hDV70885870 | rs17124176 | 0.51 | 0.904876352 | 1 |
| hCV25610857 | rs8176693 | hCV11571465 | rs2301612 | 0.51 | 0.148365232 | 0.1634 |
| hCV25610857 | rs8176693 | hCV11840510 | rs9411367 | 0.51 | 0.148365232 | 0.4123 |
| hCV25610857 | rs8176693 | hCV153353 | rs7469576 | 0.51 | 0.148365232 | 0.4257 |
| hCV25610857 | rs8176693 | hCV15862346 | rs2073934 | 0.51 | 0.148365232 | 0.207 |
| hCV25610857 | rs8176693 | hCV2535958 | rs2519198 | 0.51 | 0.148365232 | 0.1685 |
| hCV25610857 | rs8176693 | hCV25610771 | rs8176751 | 0.51 | 0.148365232 | 0.8731 |
| hCV25610857 | rs8176693 | hCV25610772 | rs8176746 | 0.51 | 0.148365232 | 1 |
| hCV25610857 | rs8176693 | hCV25610773 | rs8176747 | 0.51 | 0.148365232 | 0.6839 |
| hCV25610857 | rs8176693 | hCV25610781 | rs8176749 | 0.51 | 0.148365232 | 1 |
| hCV25610857 | rs8176693 | hCV25610791 | rs8176743 | 0.51 | 0.148365232 | 1 |
| hCV25610857 | rs8176693 | hCV25757025 | rs2269894 | 0.51 | 0.148365232 | 0.1542 |
| hCV25610857 | rs8176693 | hCV25987572 | rs4310274 | 0.51 | 0.148365232 | 0.3888 |
| hCV25610857 | rs8176693 | hCV26744892 | rs11244079 | 0.51 | 0.148365232 | 0.8127 |
| hCV25610857 | rs8176693 | hCV26744899 | rs10751505 | 0.51 | 0.148365232 | 0.1768 |
| hCV25610857 | rs8176693 | hCV27224736 | rs2073870 | 0.51 | 0.148365232 | 0.3707 |
| hCV25610857 | rs8176693 | hCV27224742 | rs4454354 | 0.51 | 0.148365232 | 0.234 |
| hCV25610857 | rs8176693 | hCV27224746 | rs10793959 | 0.51 | 0.148365232 | 0.2969 |
| hCV25610857 | rs8176693 | hCV27224748 | rs4246169 | 0.51 | 0.148365232 | 0.3912 |
| hCV25610857 | rs8176693 | hCV27224776 | rs7852396 | 0.51 | 0.148365232 | 0.3577 |
| hCV25610857 | rs8176693 | hCV27224778 | rs11244041 | 0.51 | 0.148365232 | 0.3526 |
| hCV25610857 | rs8176693 | hCV27478783 | rs3761823 | 0.51 | 0.148365232 | 0.2233 |
| hCV25610857 | rs8176693 | hCV27859399 | rs7853989 | 0.51 | 0.148365232 | 0.817 |
| hCV25610857 | rs8176693 | hCV27886018 | rs4962104 | 0.51 | 0.148365232 | 0.2333 |
| hCV25610857 | rs8176693 | hCV27936941 | rs4379511 | 0.51 | 0.148365232 | 0.4056 |
| hCV25610857 | rs8176693 | hCV27936942 | rs4424335 | 0.51 | 0.148365232 | 0.7914 |
| hCV25610857 | rs8176693 | hCV28002068 | rs4322078 | 0.51 | 0.148365232 | 0.3912 |
| hCV25610857 | rs8176693 | hCV29393501 | rs4507838 | 0.51 | 0.148365232 | 0.4037 |
| hCV25610857 | rs8176693 | hCV29393505 | rs4962039 | 0.51 | 0.148365232 | 0.773 |
| hCV25610857 | rs8176693 | hCV29393508 | rs7046863 | 0.51 | 0.148365232 | 0.4262 |
| hCV25610857 | rs8176693 | hCV29531061 | rs9411464 | 0.51 | 0.148365232 | 0.6098 |
| hCV25610857 | rs8176693 | hCV29549191 | rs9411468 | 0.51 | 0.148365232 | 0.4483 |
| hCV25610857 | rs8176693 | hCV29597378 | rs8176672 | 0.51 | 0.148365232 | 1 |
| hCV25610857 | rs8176693 | hCV29711974 | rs7855466 | 0.51 | 0.148365232 | 0.4729 |
| hCV25610857 | rs8176693 | hCV2980259 | rs3761821 | 0.51 | 0.148365232 | 0.2969 |
| hCV25610857 | rs8176693 | hCV30504633 | rs9919007 | 0.51 | 0.148365232 | 0.4404 |
| hCV25610857 | rs8176693 | hCV30613004 | rs7855713 | 0.51 | 0.148365232 | 0.8222 |
| hCV25610857 | rs8176693 | hCV3183094 | rs8176731 | 0.51 | 0.148365232 | 0.1683 |
| hCV25610857 | rs8176693 | hCV3183096 | rs8176730 | 0.51 | 0.148365232 | 0.8013 |
| hCV25610857 | rs8176693 | hCV3183097 | rs8176725 | 0.51 | 0.148365232 | 0.802 |
| hCV25610857 | rs8176693 | hCV3183099 | rs8176722 | 0.51 | 0.148365232 | 0.8856 |
| hCV25610857 | rs8176693 | hCV3183100 | rs8176720 | 0.51 | 0.148365232 | 0.1485 |
| hCV25610857 | rs8176693 | hCV3183111 | rs643434 | 0.51 | 0.148365232 | 0.1634 |
| hCV25610857 | rs8176693 | hCV3183117 | rs545971 | 0.51 | 0.148365232 | 0.1765 |
| hCV25610857 | rs8176693 | hCV3183164 | rs529565 | 0.51 | 0.148365232 | 0.1765 |
| hCV25610857 | rs8176693 | hCV3183246 | rs10901263 | 0.51 | 0.148365232 | 0.2682 |
| hCV25610857 | rs8176693 | hCV3183251 | rs529309 | 0.51 | 0.148365232 | 0.1698 |
| hCV25610857 | rs8176693 | hCV3183341 | rs2285489 | 0.51 | 0.148365232 | 0.15 |
| hCV25610857 | rs8176693 | hCV3183366 | rs2073933 | 0.51 | 0.148365232 | 0.1731 |
| hCV25610857 | rs8176693 | hCV32126435 | rs11244034 | 0.51 | 0.148365232 | 0.3883 |
| hCV25610857 | rs8176693 | hCV32126442 | rs7864821 | 0.51 | 0.148365232 | 0.2969 |
| hCV25610857 | rs8176693 | hCV32126443 | rs10793957 | 0.51 | 0.148365232 | 0.2998 |
| hCV25610857 | rs8176693 | hCV32126447 | rs6597610 | 0.51 | 0.148365232 | 0.2969 |
| hCV25610857 | rs8176693 | hCV32126454 | rs13300535 | 0.51 | 0.148365232 | 0.2819 |
| hCV25610857 | rs8176693 | hCV32126487 | rs10901250 | 0.51 | 0.148365232 | 0.4799 |
| hCV25610857 | rs8176693 | hCV442675 | rs9411471 | 0.51 | 0.148365232 | 0.4262 |
| hCV25610857 | rs8176693 | hCV7481808 | rs886082 | 0.51 | 0.148365232 | 0.3072 |
| hCV25610857 | rs8176693 | hCV7948166 | rs9411463 | 0.51 | 0.148365232 | 0.8913 |
| hCV25610857 | rs8176693 | hCV7948171 | rs4246170 | 0.51 | 0.148365232 | 0.876 |
| hCV25610857 | rs8176693 | hCV8784837 | rs886090 | 0.51 | 0.148365232 | 0.1807 |
| hCV25610857 | rs8176693 | hCV9326428 | rs687289 | 0.51 | 0.148365232 | 0.1765 |
| hCV25610857 | rs8176693 | hCV9326429 | rs687621 | 0.51 | 0.148365232 | 0.1821 |
| hCV25610857 | rs8176693 | hCV9327931 | rs17150482 | 0.51 | 0.148365232 | 0.2489 |
| hCV25610857 | rs8176693 | hCV997908 | rs514659 | 0.51 | 0.148365232 | 0.175 |
| hCV25610857 | rs8176693 | hCV997918 | rs674302 | 0.51 | 0.148365232 | 0.1765 |
| hCV25610857 | rs8176693 | hCV998010 | rs493014 | 0.51 | 0.148365232 | 0.1498 |
| hCV25610857 | rs8176693 | hDV72329597 | rs28793911 | 0.51 | 0.148365232 | 0.1731 |
| hCV25620145 | rs867186 | hCV11189166 | rs11906318 | 0.51 | 0.329132176 | 1 |
| hCV25620145 | rs867186 | hCV11189205 | rs7261312 | 0.51 | 0.329132176 | 1 |
| hCV25620145 | rs867186 | hCV1271665 | rs17092456 | 0.51 | 0.329132176 | 1 |
| hCV25620145 | rs867186 | hCV1348012 | rs6060230 | 0.51 | 0.329132176 | 1 |
| hCV25620145 | rs867186 | hCV1348016 | rs6060246 | 0.51 | 0.329132176 | 1 |
| hCV25620145 | rs867186 | hCV1348030 | rs11908683 | 0.51 | 0.329132176 | 1 |
| hCV25620145 | rs867186 | hCV1348034 | rs2295888 | 0.51 | 0.329132176 | 1 |
| hCV25620145 | rs867186 | hCV16189181 | rs2295097 | 0.51 | 0.329132176 | 0.576 |
| hCV25620145 | rs867186 | hCV1825062 | rs6087685 | 0.51 | 0.329132176 | 0.3794 |
| hCV25620145 | rs867186 | hCV25472481 | rs2275274 | 0.51 | 0.329132176 | 0.5913 |
| hCV25620145 | rs867186 | hCV25952685 | rs17092297 | 0.51 | 0.329132176 | 1 |
| hCV25620145 | rs867186 | hCV27167646 | rs11699306 | 0.51 | 0.329132176 | 0.6217 |
| hCV25620145 | rs867186 | hCV27167730 | rs2889873 | 0.51 | 0.329132176 | 1 |
| hCV25620145 | rs867186 | hCV29372789 | rs7274866 | 0.51 | 0.329132176 | 1 |
| hCV25620145 | rs867186 | hCV29372790 | rs6579211 | 0.51 | 0.329132176 | 1 |
| hCV25620145 | rs867186 | hCV29372796 | rs7261167 | 0.51 | 0.329132176 | 1 |
| hCV25620145 | rs867186 | hCV29373046 | rs8119351 | 0.51 | 0.329132176 | 1 |
| hCV25620145 | rs867186 | hCV29373059 | rs8117847 | 0.51 | 0.329132176 | 1 |
| hCV25620145 | rs867186 | hCV29729417 | rs6060240 | 0.51 | 0.329132176 | 0.6395 |
| hCV25620145 | rs867186 | hCV29765455 | rs6058181 | 0.51 | 0.329132176 | 0.6863 |
| hCV25620145 | rs867186 | hCV30180149 | rs9941751 | 0.51 | 0.329132176 | 1 |
| hCV25620145 | rs867186 | hCV30270043 | rs6060257 | 0.51 | 0.329132176 | 0.8996 |
| hCV25620145 | rs867186 | hCV30342001 | rs10485508 | 0.51 | 0.329132176 | 1 |
| hCV25620145 | rs867186 | hCV30342056 | rs6060245 | 0.51 | 0.329132176 | 1 |
| hCV25620145 | rs867186 | hCV30342057 | rs6060239 | 0.51 | 0.329132176 | 0.6573 |
| hCV25620145 | rs867186 | hCV30540318 | rs6060244 | 0.51 | 0.329132176 | 1 |
| hCV25620145 | rs867186 | hCV30576442 | rs6120843 | 0.51 | 0.329132176 | 0.8996 |
| hCV25620145 | rs867186 | hCV32066118 | rs7271729 | 0.51 | 0.329132176 | 1 |
| hCV25620145 | rs867186 | hCV32066123 | rs7273734 | 0.51 | 0.329132176 | 1 |
| hCV25620145 | rs867186 | hCV32066133 | rs11906160 | 0.51 | 0.329132176 | 0.816 |
| hCV25620145 | rs867186 | hCV32066684 | rs11167260 | 0.51 | 0.329132176 | 1 |
| hCV25620145 | rs867186 | hCV32066690 | rs7265317 | 0.51 | 0.329132176 | 1 |
| hCV25620145 | rs867186 | hCV32066710 | rs11907010 | 0.51 | 0.329132176 | 1 |
| hCV25620145 | rs867186 | hCV32066768 | rs7263253 | 0.51 | 0.329132176 | 1 |
| hCV25620145 | rs867186 | hCV624499 | rs717593 | 0.51 | 0.329132176 | 1 |
| hCV25620145 | rs867186 | hCV7593265 | rs1033799 | 0.51 | 0.329132176 | 0.8996 |
| hCV25620145 | rs867186 | hCV7593267 | rs1033797 | 0.51 | 0.329132176 | 1 |
| hCV25620145 | rs867186 | hDV70862590 | rs17092215 | 0.51 | 0.329132176 | 1 |
| hCV25620145 | rs867186 | hDV70936222 | rs17309872 | 0.51 | 0.329132176 | 0.5774 |
| hCV25620145 | rs867186 | hDV70936327 | rs17310467 | 0.51 | 0.329132176 | 0.9424 |
| hCV25620145 | rs867186 | hDV70948869 | rs17401737 | 0.51 | 0.329132176 | 1 |
| hCV25620145 | rs867186 | hDV70949473 | rs17406518 | 0.51 | 0.329132176 | 0.709 |
| hCV25620145 | rs867186 | hDV72054460 | rs8117100 | 0.51 | 0.329132176 | 1 |
| hCV25620145 | rs867186 | hDV75209987 | rs2069940 | 0.51 | 0.329132176 | 0.9474 |
| hCV25748719 | hCV25748719 | hCV11828144 | rs11679975 | 0.51 | 0.912579748 | 1 |
| hCV25748719 | hCV25748719 | hCV11828147 | rs10496693 | 0.51 | 0.912579748 | 0.9529 |
| hCV25748719 | hCV25748719 | hCV2163177 | rs12618525 | 0.51 | 0.912579748 | 0.9518 |
| hCV25748719 | hCV25748719 | hCV25749343 | rs16841277 | 0.51 | 0.912579748 | 1 |
| hCV25748719 | hCV25748719 | hCV3212676 | rs4143562 | 0.51 | 0.912579748 | 1 |
| hCV25748719 | hCV25748719 | hCV7479717 | rs1367392 | 0.51 | 0.912579748 | 1 |
| hCV25748719 | hCV25748719 | hDV70679361 | rs16841210 | 0.51 | 0.912579748 | 1 |
| hCV25990131 | rs13146272 | hCV11786147 | rs4862662 | 0.51 | 0.143358157 | 0.4248 |
| hCV25990131 | rs13146272 | hCV11786258 | rs4253303 | 0.51 | 0.143358157 | 0.3213 |
| hCV25990131 | rs13146272 | hCV11786259 | rs4253304 | 0.51 | 0.143358157 | 0.2413 |
| hCV25990131 | rs13146272 | hCV12066116 | rs1877320 | 0.51 | 0.143358157 | 0.1908 |
| hCV25990131 | rs13146272 | hCV12066118 | rs2048 | 0.51 | 0.143358157 | 0.1915 |
| hCV25990131 | rs13146272 | hCV12066119 | rs1912826 | 0.51 | 0.143358157 | 0.1697 |
| hCV25990131 | rs13146272 | hCV12066124 | rs2036914 | 0.51 | 0.143358157 | 0.1776 |
| hCV25990131 | rs13146272 | hCV12066129 | rs1593 | 0.51 | 0.143358157 | 0.1539 |
| hCV25990131 | rs13146272 | hCV15793897 | rs3087505 | 0.51 | 0.143358157 | 0.1528 |
| hCV25990131 | rs13146272 | hCV15811716 | rs2102575 | 0.51 | 0.143358157 | 0.144 |
| hCV25990131 | rs13146272 | hCV15882886 | rs2276916 | 0.51 | 0.143358157 | 0.1604 |
| hCV25990131 | rs13146272 | hCV15968025 | rs2292425 | 0.51 | 0.143358157 | 1 |
| hCV25990131 | rs13146272 | hCV15968026 | rs2292426 | 0.51 | 0.143358157 | 0.8904 |
| hCV25990131 | rs13146272 | hCV15968043 | rs2292423 | 0.51 | 0.143358157 | 0.2261 |
| hCV25990131 | rs13146272 | hCV15975109 | rs2304596 | 0.51 | 0.143358157 | 0.3895 |
| hCV25990131 | rs13146272 | hCV2103343 | rs4241824 | 0.51 | 0.143358157 | 0.1563 |
| hCV25990131 | rs13146272 | hCV2103392 | rs12500826 | 0.51 | 0.143358157 | 0.1597 |
| hCV25990131 | rs13146272 | hCV22272267 | rs3733402 | 0.51 | 0.143358157 | 0.1915 |
| hCV25990131 | rs13146272 | hCV25474413 | rs3822057 | 0.51 | 0.143358157 | 0.1706 |
| hCV25990131 | rs13146272 | hCV25988221 | rs9995366 | 0.51 | 0.143358157 | 0.1617 |
| hCV25990131 | rs13146272 | hCV25989001 | hCV25989001 | 0.51 | 0.143358157 | 0.3491 |
| hCV25990131 | rs13146272 | hCV26265231 | rs7684025 | 0.51 | 0.143358157 | 0.3297 |
| hCV25990131 | rs13146272 | hCV27477533 | rs3756008 | 0.51 | 0.143358157 | 0.1634 |
| hCV25990131 | rs13146272 | hCV27482765 | rs3775301 | 0.51 | 0.143358157 | 0.3895 |
| hCV25990131 | rs13146272 | hCV27902803 | rs4862665 | 0.51 | 0.143358157 | 0.1617 |
| hCV25990131 | rs13146272 | hCV27902808 | rs4253236 | 0.51 | 0.143358157 | 0.3974 |
| hCV25990131 | rs13146272 | hCV28960679 | rs6844764 | 0.51 | 0.143358157 | 0.1752 |
| hCV25990131 | rs13146272 | hCV29053261 | rs6842047 | 0.51 | 0.143358157 | 0.1528 |
| hCV25990131 | rs13146272 | hCV29053264 | rs7667777 | 0.51 | 0.143358157 | 0.4279 |
| hCV25990131 | rs13146272 | hCV29053265 | rs4253244 | 0.51 | 0.143358157 | 0.3445 |
| hCV25990131 | rs13146272 | hCV29053266 | rs7687961 | 0.51 | 0.143358157 | 0.2979 |
| hCV25990131 | rs13146272 | hCV29718000 | rs4253238 | 0.51 | 0.143358157 | 0.2008 |
| hCV25990131 | rs13146272 | hCV29826351 | rs10025990 | 0.51 | 0.143358157 | 0.1633 |
| hCV25990131 | rs13146272 | hCV29877725 | rs4253295 | 0.51 | 0.143358157 | 0.3626 |
| hCV25990131 | rs13146272 | hCV30492573 | rs10471184 | 0.51 | 0.143358157 | 0.1528 |
| hCV25990131 | rs13146272 | hCV30983902 | rs4862668 | 0.51 | 0.143358157 | 0.1908 |
| hCV25990131 | rs13146272 | hCV30983927 | rs6552962 | 0.51 | 0.143358157 | 0.3677 |
| hCV25990131 | rs13146272 | hCV32209815 | rs7660915 | 0.51 | 0.143358157 | 0.1573 |
| hCV25990131 | rs13146272 | hCV32291217 | rs4253323 | 0.51 | 0.143358157 | 0.3895 |
| hCV25990131 | rs13146272 | hCV32291295 | rs4253292 | 0.51 | 0.143358157 | 0.4332 |
| hCV25990131 | rs13146272 | hCV32291301 | rs4253302 | 0.51 | 0.143358157 | 0.3944 |
| hCV25990131 | rs13146272 | hCV32295028 | rs4253260 | 0.51 | 0.143358157 | 0.3895 |
| hCV25990131 | rs13146272 | hCV3229991 | rs4241815 | 0.51 | 0.143358157 | 0.1915 |
| hCV25990131 | rs13146272 | hCV3229992 | rs3775298 | 0.51 | 0.143358157 | 0.1915 |
| hCV25990131 | rs13146272 | hCV3229995 | rs11132382 | 0.51 | 0.143358157 | 0.1909 |
| hCV25990131 | rs13146272 | hCV3230002 | rs4253297 | 0.51 | 0.143358157 | 0.3314 |
| hCV25990131 | rs13146272 | hCV3230003 | rs2304595 | 0.51 | 0.143358157 | 0.2642 |
| hCV25990131 | rs13146272 | hCV3230006 | rs4253308 | 0.51 | 0.143358157 | 0.3626 |
| hCV25990131 | rs13146272 | hCV3230007 | rs4253311 | 0.51 | 0.143358157 | 0.1915 |
| hCV25990131 | rs13146272 | hCV3230011 | rs4253320 | 0.51 | 0.143358157 | 0.3314 |
| hCV25990131 | rs13146272 | hCV3230013 | rs3775303 | 0.51 | 0.143358157 | 0.2413 |
| hCV25990131 | rs13146272 | hCV3230025 | rs3756009 | 0.51 | 0.143358157 | 0.2436 |
| hCV25990131 | rs13146272 | hCV3230083 | rs10013653 | 0.51 | 0.143358157 | 0.3137 |
| hCV25990131 | rs13146272 | hCV3230084 | rs7682918 | 0.51 | 0.143358157 | 0.4336 |
| hCV25990131 | rs13146272 | hCV3230094 | rs7687818 | 0.51 | 0.143358157 | 0.3187 |
| hCV25990131 | rs13146272 | hCV3230096 | rs3817184 | 0.51 | 0.143358157 | 0.4248 |
| hCV25990131 | rs13146272 | hCV3230097 | rs3736455 | 0.51 | 0.143358157 | 0.8444 |
| hCV25990131 | rs13146272 | hCV3230113 | rs1053094 | 0.51 | 0.143358157 | 0.1593 |
| hCV25990131 | rs13146272 | hCV32313006 | rs4253248 | 0.51 | 0.143358157 | 0.1954 |
| hCV25990131 | rs13146272 | hCV32313007 | rs4862666 | 0.51 | 0.143358157 | 0.1617 |
| hCV25990131 | rs13146272 | hCV32313024 | rs4253239 | 0.51 | 0.143358157 | 0.4332 |
| hCV25990131 | rs13146272 | hCV32358975 | rs4253255 | 0.51 | 0.143358157 | 0.1791 |
| hCV25990131 | rs13146272 | hCV32358984 | rs4253256 | 0.51 | 0.143358157 | 0.3717 |
| hCV25990131 | rs13146272 | hCV8241630 | rs925451 | 0.51 | 0.143358157 | 0.1564 |
| hCV25990131 | rs13146272 | hCV8241631 | rs1511802 | 0.51 | 0.143358157 | 0.3665 |
| hCV25990131 | rs13146272 | hCV8241632 | rs1511801 | 0.51 | 0.143358157 | 0.193 |
| hCV25990131 | rs13146272 | hCV8241633 | rs1511800 | 0.51 | 0.143358157 | 0.1617 |
| hCV25990131 | rs13146272 | hDV71222711 | rs4253252 | 0.51 | 0.143358157 | 0.1954 |
| hCV25990131 | rs13146272 | hDV76175111 | rs35079309 | 0.51 | 0.143358157 | 0.1697 |
| hCV263841 | rs1523127 | hCV105917 | rs9289134 | 0.51 | 0.401557164 | 0.4905 |
| hCV263841 | rs1523127 | hCV11230788 | rs7643038 | 0.51 | 0.401557164 | 1 |
| hCV263841 | rs1523127 | hCV134275 | rs9847068 | 0.51 | 0.401557164 | 0.4525 |
| hCV263841 | rs1523127 | hCV134278 | rs9848716 | 0.51 | 0.401557164 | 0.4627 |
| hCV263841 | rs1523127 | hCV15882316 | rs2276706 | 0.51 | 0.401557164 | 1 |
| hCV263841 | rs1523127 | hCV178227 | rs13070374 | 0.51 | 0.401557164 | 0.5348 |
| hCV263841 | rs1523127 | hCV178228 | rs4687882 | 0.51 | 0.401557164 | 0.5054 |
| hCV263841 | rs1523127 | hCV1833991 | rs11926554 | 0.51 | 0.401557164 | 0.5461 |
| hCV263841 | rs1523127 | hCV1834237 | rs9865270 | 0.51 | 0.401557164 | 0.4905 |
| hCV263841 | rs1523127 | hCV1834240 | rs1581451 | 0.51 | 0.401557164 | 1 |
| hCV263841 | rs1523127 | hCV1834242 | rs11712308 | 0.51 | 0.401557164 | 0.4291 |
| hCV263841 | rs1523127 | hCV1834243 | rs9682652 | 0.51 | 0.401557164 | 0.5871 |
| hCV263841 | rs1523127 | hCV1834252 | rs10934498 | 0.51 | 0.401557164 | 0.9212 |
| hCV263841 | rs1523127 | hCV1834256 | rs2472662 | 0.51 | 0.401557164 | 0.4402 |
| hCV263841 | rs1523127 | hCV1834260 | rs4688033 | 0.51 | 0.401557164 | 0.5676 |
| hCV263841 | rs1523127 | hCV192027 | rs9821892 | 0.51 | 0.401557164 | 0.5871 |
| hCV263841 | rs1523127 | hCV255886 | rs10511394 | 0.51 | 0.401557164 | 0.569 |
| hCV263841 | rs1523127 | hCV27504984 | rs3814055 | 0.51 | 0.401557164 | 1 |
| hCV263841 | rs1523127 | hCV278948 | rs1464599 | 0.51 | 0.401557164 | 0.569 |
| hCV263841 | rs1523127 | hCV29841665 | rs7623217 | 0.51 | 0.401557164 | 0.5802 |
| hCV263841 | rs1523127 | hCV30562884 | rs9815093 | 0.51 | 0.401557164 | 0.4905 |
| hCV263841 | rs1523127 | hCV30699687 | rs11711386 | 0.51 | 0.401557164 | 0.4402 |
| hCV263841 | rs1523127 | hCV30747432 | rs12488820 | 0.51 | 0.401557164 | 0.9212 |
| hCV263841 | rs1523127 | hCV9152783 | rs1523130 | 0.51 | 0.401557164 | 0.9003 |
| hCV27474895 | rs3756011 | hCV11786147 | rs4862662 | 0.51 | 0.046522553 | 0.1651 |
| hCV27474895 | rs3756011 | hCV11786235 | rs4253287 | 0.51 | 0.046522553 | 0.096 |
| hCV27474895 | rs3756011 | hCV11786258 | rs4253303 | 0.51 | 0.046522553 | 0.1518 |
| hCV27474895 | rs3756011 | hCV11786259 | rs4253304 | 0.51 | 0.046522553 | 0.2126 |
| hCV27474895 | rs3756011 | hCV11786295 | rs4253421 | 0.51 | 0.046522553 | 0.0964 |
| hCV27474895 | rs3756011 | hCV11786301 | rs5970 | 0.51 | 0.046522553 | 0.0964 |
| hCV27474895 | rs3756011 | hCV11786307 | rs1062547 | 0.51 | 0.046522553 | 0.3474 |
| hCV27474895 | rs3756011 | hCV11786311 | rs13145616 | 0.51 | 0.046522553 | 0.0964 |
| hCV27474895 | rs3756011 | hCV11786327 | rs13133050 | 0.51 | 0.046522553 | 0.2195 |
| hCV27474895 | rs3756011 | hCV12066116 | rs1877320 | 0.51 | 0.046522553 | 0.0698 |
| hCV27474895 | rs3756011 | hCV12066118 | rs2048 | 0.51 | 0.046522553 | 0.0958 |
| hCV27474895 | rs3756011 | hCV12066119 | rs1912826 | 0.51 | 0.046522553 | 0.1115 |
| hCV27474895 | rs3756011 | hCV12066124 | rs2036914 | 0.51 | 0.046522553 | 0.4851 |
| hCV27474895 | rs3756011 | hCV12066129 | rs1593 | 0.51 | 0.046522553 | 0.0705 |
| hCV27474895 | rs3756011 | hCV1333076 | rs7656944 | 0.51 | 0.046522553 | 0.0488 |
| hCV27474895 | rs3756011 | hCV1333077 | rs7656763 | 0.51 | 0.046522553 | 0.0488 |
| hCV27474895 | rs3756011 | hCV1333078 | rs9998003 | 0.51 | 0.046522553 | 0.0625 |
| hCV27474895 | rs3756011 | hCV1333102 | rs10016252 | 0.51 | 0.046522553 | 0.0488 |
| hCV27474895 | rs3756011 | hCV15793897 | rs3087505 | 0.51 | 0.046522553 | 0.0748 |
| hCV27474895 | rs3756011 | hCV15811716 | rs2102575 | 0.51 | 0.046522553 | 0.0679 |
| hCV27474895 | rs3756011 | hCV15880920 | rs2289253 | 0.51 | 0.046522553 | 0.0479 |
| hCV27474895 | rs3756011 | hCV15968025 | rs2292425 | 0.51 | 0.046522553 | 0.138 |
| hCV27474895 | rs3756011 | hCV15968026 | rs2292426 | 0.51 | 0.046522553 | 0.1681 |
| hCV27474895 | rs3756011 | hCV15968043 | rs2292423 | 0.51 | 0.046522553 | 0.1967 |
| hCV27474895 | rs3756011 | hCV16172925 | rs2241818 | 0.51 | 0.046522553 | 0.095 |
| hCV27474895 | rs3756011 | hCV16172935 | rs2241817 | 0.51 | 0.046522553 | 0.3529 |
| hCV27474895 | rs3756011 | hCV194962 | rs6552954 | 0.51 | 0.046522553 | 0.0471 |
| hCV27474895 | rs3756011 | hCV2103343 | rs4241824 | 0.51 | 0.046522553 | 0.5177 |
| hCV27474895 | rs3756011 | hCV2103388 | rs4613610 | 0.51 | 0.046522553 | 0.1053 |
| hCV27474895 | rs3756011 | hCV2103391 | rs1008728 | 0.51 | 0.046522553 | 0.3064 |
| hCV27474895 | rs3756011 | hCV2103392 | rs12500826 | 0.51 | 0.046522553 | 0.286 |
| hCV27474895 | rs3756011 | hCV22272267 | rs3733402 | 0.51 | 0.046522553 | 0.0893 |
| hCV27474895 | rs3756011 | hCV25474413 | rs3822057 | 0.51 | 0.046522553 | 0.5232 |
| hCV27474895 | rs3756011 | hCV25474414 | rs4253399 | 0.51 | 0.046522553 | 0.7565 |
| hCV27474895 | rs3756011 | hCV25634754 | rs4253331 | 0.51 | 0.046522553 | 0.0475 |
| hCV27474895 | rs3756011 | hCV25988221 | rs9995366 | 0.51 | 0.046522553 | 0.0748 |
| hCV27474895 | rs3756011 | hCV25990131 | rs13146272 | 0.51 | 0.046522553 | 0.1401 |
| hCV27474895 | rs3756011 | hCV26038139 | rs4253405 | 0.51 | 0.046522553 | 0.2975 |
| hCV27474895 | rs3756011 | hCV26265231 | rs7684025 | 0.51 | 0.046522553 | 0.2227 |
| hCV27474895 | rs3756011 | hCV27309991 | rs4572916 | 0.51 | 0.046522553 | 0.1096 |
| hCV27474895 | rs3756011 | hCV27473099 | rs3733403 | 0.51 | 0.046522553 | 0.0591 |
| hCV27474895 | rs3756011 | hCV27477533 | rs3756008 | 0.51 | 0.046522553 | 0.7565 |
| hCV27474895 | rs3756011 | hCV27490984 | rs3822058 | 0.51 | 0.046522553 | 0.3739 |
| hCV27474895 | rs3756011 | hCV27902803 | rs4862665 | 0.51 | 0.046522553 | 0.0748 |
| hCV27474895 | rs3756011 | hCV27902808 | rs4253236 | 0.51 | 0.046522553 | 0.0489 |
| hCV27474895 | rs3756011 | hCV28960679 | rs6844764 | 0.51 | 0.046522553 | 0.1341 |
| hCV27474895 | rs3756011 | hCV29053261 | rs6842047 | 0.51 | 0.046522553 | 0.0748 |
| hCV27474895 | rs3756011 | hCV29053264 | rs7667777 | 0.51 | 0.046522553 | 0.1527 |
| hCV27474895 | rs3756011 | hCV29053266 | rs7687961 | 0.51 | 0.046522553 | 0.0784 |
| hCV27474895 | rs3756011 | hCV29640635 | rs10029715 | 0.51 | 0.046522553 | 0.1232 |
| hCV27474895 | rs3756011 | hCV29718000 | rs4253238 | 0.51 | 0.046522553 | 0.1192 |
| hCV27474895 | rs3756011 | hCV29826351 | rs10025990 | 0.51 | 0.046522553 | 0.078 |
| hCV27474895 | rs3756011 | hCV29877725 | rs4253295 | 0.51 | 0.046522553 | 0.2015 |
| hCV27474895 | rs3756011 | hCV30307525 | rs10025152 | 0.51 | 0.046522553 | 0.1232 |
| hCV27474895 | rs3756011 | hCV30492573 | rs10471184 | 0.51 | 0.046522553 | 0.0748 |
| hCV27474895 | rs3756011 | hCV30562347 | rs4253418 | 0.51 | 0.046522553 | 0.0479 |
| hCV27474895 | rs3756011 | hCV30983902 | rs4862668 | 0.51 | 0.046522553 | 0.0667 |
| hCV27474895 | rs3756011 | hCV30983927 | rs6552962 | 0.51 | 0.046522553 | 0.0811 |
| hCV27474895 | rs3756011 | hCV32209629 | rs12715865 | 0.51 | 0.046522553 | 0.1297 |
| hCV27474895 | rs3756011 | hCV32209635 | rs6848311 | 0.51 | 0.046522553 | 0.1065 |
| hCV27474895 | rs3756011 | hCV32209636 | rs11132387 | 0.51 | 0.046522553 | 0.44 |
| hCV27474895 | rs3756011 | hCV32209637 | rs13143773 | 0.51 | 0.046522553 | 0.2103 |
| hCV27474895 | rs3756011 | hCV32209638 | rs12507040 | 0.51 | 0.046522553 | 0.2952 |
| hCV27474895 | rs3756011 | hCV32291256 | rs4253406 | 0.51 | 0.046522553 | 0.0719 |
| hCV27474895 | rs3756011 | hCV32291269 | rs4253417 | 0.51 | 0.046522553 | 0.9279 |
| hCV27474895 | rs3756011 | hCV32291286 | rs4253422 | 0.51 | 0.046522553 | 0.1355 |
| hCV27474895 | rs3756011 | hCV32291287 | rs4253423 | 0.51 | 0.046522553 | 0.1355 |
| hCV27474895 | rs3756011 | hCV3229991 | rs4241815 | 0.51 | 0.046522553 | 0.0893 |
| hCV27474895 | rs3756011 | hCV3229992 | rs3775298 | 0.51 | 0.046522553 | 0.0893 |
| hCV27474895 | rs3756011 | hCV3229995 | rs11132382 | 0.51 | 0.046522553 | 0.1192 |
| hCV27474895 | rs3756011 | hCV3230002 | rs4253297 | 0.51 | 0.046522553 | 0.1602 |
| hCV27474895 | rs3756011 | hCV3230003 | rs2304595 | 0.51 | 0.046522553 | 0.2636 |
| hCV27474895 | rs3756011 | hCV3230006 | rs4253308 | 0.51 | 0.046522553 | 0.2015 |
| hCV27474895 | rs3756011 | hCV3230007 | rs4253311 | 0.51 | 0.046522553 | 0.0893 |
| hCV27474895 | rs3756011 | hCV3230010 | rs4253315 | 0.51 | 0.046522553 | 0.0729 |
| hCV27474895 | rs3756011 | hCV3230011 | rs4253320 | 0.51 | 0.046522553 | 0.1602 |
| hCV27474895 | rs3756011 | hCV3230013 | rs3775303 | 0.51 | 0.046522553 | 0.2126 |
| hCV27474895 | rs3756011 | hCV3230016 | rs4253325 | 0.51 | 0.046522553 | 0.0964 |
| hCV27474895 | rs3756011 | hCV3230017 | rs4253327 | 0.51 | 0.046522553 | 0.0647 |
| hCV27474895 | rs3756011 | hCV3230021 | rs13135645 | 0.51 | 0.046522553 | 0.0602 |
| hCV27474895 | rs3756011 | hCV3230022 | rs11132383 | 0.51 | 0.046522553 | 0.1964 |
| hCV27474895 | rs3756011 | hCV3230025 | rs3756009 | 0.51 | 0.046522553 | 0.8008 |
| hCV27474895 | rs3756011 | hCV3230030 | rs4253408 | 0.51 | 0.046522553 | 0.0889 |
| hCV27474895 | rs3756011 | hCV3230031 | rs4253419 | 0.51 | 0.046522553 | 0.1355 |
| hCV27474895 | rs3756011 | hCV3230032 | rs5974 | 0.51 | 0.046522553 | 0.0964 |
| hCV27474895 | rs3756011 | hCV3230038 | rs2289252 | 0.51 | 0.046522553 | 1 |
| hCV27474895 | rs3756011 | hCV3230083 | rs10013653 | 0.51 | 0.046522553 | 0.2455 |
| hCV27474895 | rs3756011 | hCV3230084 | rs7682918 | 0.51 | 0.046522553 | 0.1899 |
| hCV27474895 | rs3756011 | hCV3230094 | rs7687818 | 0.51 | 0.046522553 | 0.2475 |
| hCV27474895 | rs3756011 | hCV3230096 | rs3817184 | 0.51 | 0.046522553 | 0.1852 |
| hCV27474895 | rs3756011 | hCV3230097 | rs3736455 | 0.51 | 0.046522553 | 0.181 |
| hCV27474895 | rs3756011 | hCV3230113 | rs1053094 | 0.51 | 0.046522553 | 0.1126 |
| hCV27474895 | rs3756011 | hCV3230118 | rs4253429 | 0.51 | 0.046522553 | 0.1355 |
| hCV27474895 | rs3756011 | hCV3230119 | rs4253430 | 0.51 | 0.046522553 | 0.3739 |
| hCV27474895 | rs3756011 | hCV3230121 | rs4253431 | 0.51 | 0.046522553 | 0.0964 |
| hCV27474895 | rs3756011 | hCV3230125 | rs11938564 | 0.51 | 0.046522553 | 0.198 |
| hCV27474895 | rs3756011 | hCV3230131 | rs13136269 | 0.51 | 0.046522553 | 0.2952 |
| hCV27474895 | rs3756011 | hCV3230133 | rs12511874 | 0.51 | 0.046522553 | 0.2952 |
| hCV27474895 | rs3756011 | hCV3230134 | rs12500151 | 0.51 | 0.046522553 | 0.2952 |
| hCV27474895 | rs3756011 | hCV3230136 | rs13116273 | 0.51 | 0.046522553 | 0.2675 |
| hCV27474895 | rs3756011 | hCV32313006 | rs4253248 | 0.51 | 0.046522553 | 0.1192 |
| hCV27474895 | rs3756011 | hCV32313007 | rs4862666 | 0.51 | 0.046522553 | 0.0748 |
| hCV27474895 | rs3756011 | hCV32313014 | rs4253243 | 0.51 | 0.046522553 | 0.0475 |
| hCV27474895 | rs3756011 | hCV32358975 | rs4253255 | 0.51 | 0.046522553 | 0.0845 |
| hCV27474895 | rs3756011 | hCV8241628 | rs907439 | 0.51 | 0.046522553 | 0.1096 |
| hCV27474895 | rs3756011 | hCV8241630 | rs925451 | 0.51 | 0.046522553 | 0.7876 |
| hCV27474895 | rs3756011 | hCV8241631 | rs1511802 | 0.51 | 0.046522553 | 0.2015 |
| hCV27474895 | rs3756011 | hCV8241632 | rs1511801 | 0.51 | 0.046522553 | 0.083 |
| hCV27474895 | rs3756011 | hCV8241633 | rs1511800 | 0.51 | 0.046522553 | 0.0748 |
| hCV27474895 | rs3756011 | hCV8241668 | rs1401570 | 0.51 | 0.046522553 | 0.0565 |
| hCV27474895 | rs3756011 | hDV68550952 | rs4253289 | 0.51 | 0.046522553 | 0.0624 |
| hCV27474895 | rs3756011 | hDV71222711 | rs4253252 | 0.51 | 0.046522553 | 0.1192 |
| hCV27474984 | rs3756668 | hCV11824867 | rs256507 | 0.51 | 0.529595036 | 0.7675 |
| hCV27474984 | rs3756668 | hCV1988068 | rs1445760 | 0.51 | 0.529595036 | 0.7246 |
| hCV27474984 | rs3756668 | hCV3164046 | rs9291926 | 0.51 | 0.529595036 | 0.8067 |
| hCV27474984 | rs3756668 | hCV3164066 | rs34292 | 0.51 | 0.529595036 | 0.7511 |
| hCV27474984 | rs3756668 | hCV977979 | rs256508 | 0.51 | 0.529595036 | 0.751 |
| hCV27477533 | rs3756008 | hCV11786147 | rs4862662 | 0.51 | 0.052089996 | 0.2067 |
| hCV27477533 | rs3756008 | hCV11786235 | rs4253287 | 0.51 | 0.052089996 | 0.09 |
| hCV27477533 | rs3756008 | hCV11786258 | rs4253303 | 0.51 | 0.052089996 | 0.315 |
| hCV27477533 | rs3756008 | hCV11786259 | rs4253304 | 0.51 | 0.052089996 | 0.3791 |
| hCV27477533 | rs3756008 | hCV11786295 | rs4253421 | 0.51 | 0.052089996 | 0.0524 |
| hCV27477533 | rs3756008 | hCV11786307 | rs1062547 | 0.51 | 0.052089996 | 0.273 |
| hCV27477533 | rs3756008 | hCV11786327 | rs13133050 | 0.51 | 0.052089996 | 0.1451 |
| hCV27477533 | rs3756008 | hCV12066116 | rs1877320 | 0.51 | 0.052089996 | 0.0836 |
| hCV27477533 | rs3756008 | hCV12066118 | rs2048 | 0.51 | 0.052089996 | 0.1524 |
| hCV27477533 | rs3756008 | hCV12066119 | rs1912826 | 0.51 | 0.052089996 | 0.1565 |
| hCV27477533 | rs3756008 | hCV12066124 | rs2036914 | 0.51 | 0.052089996 | 0.5443 |
| hCV27477533 | rs3756008 | hCV12066129 | rs1593 | 0.51 | 0.052089996 | 0.0893 |
| hCV27477533 | rs3756008 | hCV1333090 | rs6816112 | 0.51 | 0.052089996 | 0.0736 |
| hCV27477533 | rs3756008 | hCV1333099 | rs10020635 | 0.51 | 0.052089996 | 0.0654 |
| hCV27477533 | rs3756008 | hCV15793897 | rs3087505 | 0.51 | 0.052089996 | 0.0633 |
| hCV27477533 | rs3756008 | hCV15811716 | rs2102575 | 0.51 | 0.052089996 | 0.0597 |
| hCV27477533 | rs3756008 | hCV15968025 | rs2292425 | 0.51 | 0.052089996 | 0.156 |
| hCV27477533 | rs3756008 | hCV15968026 | rs2292426 | 0.51 | 0.052089996 | 0.2168 |
| hCV27477533 | rs3756008 | hCV15968034 | rs2292428 | 0.51 | 0.052089996 | 0.1109 |
| hCV27477533 | rs3756008 | hCV15968043 | rs2292423 | 0.51 | 0.052089996 | 0.3624 |
| hCV27477533 | rs3756008 | hCV16172925 | rs2241818 | 0.51 | 0.052089996 | 0.0782 |
| hCV27477533 | rs3756008 | hCV16172935 | rs2241817 | 0.51 | 0.052089996 | 0.2699 |
| hCV27477533 | rs3756008 | hCV2103343 | rs4241824 | 0.51 | 0.052089996 | 0.5858 |
| hCV27477533 | rs3756008 | hCV2103348 | rs11931515 | 0.51 | 0.052089996 | 0.0563 |
| hCV27477533 | rs3756008 | hCV2103388 | rs4613610 | 0.51 | 0.052089996 | 0.0953 |
| hCV27477533 | rs3756008 | hCV2103391 | rs1008728 | 0.51 | 0.052089996 | 0.1778 |
| hCV27477533 | rs3756008 | hCV2103392 | rs12500826 | 0.51 | 0.052089996 | 0.3498 |
| hCV27477533 | rs3756008 | hCV22272267 | rs3733402 | 0.51 | 0.052089996 | 0.1577 |
| hCV27477533 | rs3756008 | hCV25474413 | rs3822057 | 0.51 | 0.052089996 | 0.577 |
| hCV27477533 | rs3756008 | hCV25474414 | rs4253399 | 0.51 | 0.052089996 | 0.9414 |
| hCV27477533 | rs3756008 | hCV25634754 | rs4253331 | 0.51 | 0.052089996 | 0.1183 |
| hCV27477533 | rs3756008 | hCV25988221 | rs9995366 | 0.51 | 0.052089996 | 0.067 |
| hCV27477533 | rs3756008 | hCV25990131 | rs13146272 | 0.51 | 0.052089996 | 0.1634 |
| hCV27477533 | rs3756008 | hCV26038139 | rs4253405 | 0.51 | 0.052089996 | 0.3634 |
| hCV27477533 | rs3756008 | hCV26265231 | rs7684025 | 0.51 | 0.052089996 | 0.2597 |
| hCV27477533 | rs3756008 | hCV27309972 | rs13101296 | 0.51 | 0.052089996 | 0.1249 |
| hCV27477533 | rs3756008 | hCV27309991 | rs4572916 | 0.51 | 0.052089996 | 0.1028 |
| hCV27477533 | rs3756008 | hCV27473099 | rs3733403 | 0.51 | 0.052089996 | 0.081 |
| hCV27477533 | rs3756008 | hCV27474895 | rs3756011 | 0.51 | 0.052089996 | 0.7565 |
| hCV27477533 | rs3756008 | hCV27490984 | rs3822058 | 0.51 | 0.052089996 | 0.2804 |
| hCV27477533 | rs3756008 | hCV27521729 | rs3822056 | 0.51 | 0.052089996 | 0.0979 |
| hCV27477533 | rs3756008 | hCV27902803 | rs4862665 | 0.51 | 0.052089996 | 0.067 |
| hCV27477533 | rs3756008 | hCV27902808 | rs4253236 | 0.51 | 0.052089996 | 0.0524 |
| hCV27477533 | rs3756008 | hCV28960679 | rs6844764 | 0.51 | 0.052089996 | 0.1972 |
| hCV27477533 | rs3756008 | hCV29053261 | rs6842047 | 0.51 | 0.052089996 | 0.0633 |
| hCV27477533 | rs3756008 | hCV29053264 | rs7667777 | 0.51 | 0.052089996 | 0.2846 |
| hCV27477533 | rs3756008 | hCV29053265 | rs4253244 | 0.51 | 0.052089996 | 0.0589 |
| hCV27477533 | rs3756008 | hCV29718000 | rs4253238 | 0.51 | 0.052089996 | 0.1722 |
| hCV27477533 | rs3756008 | hCV29826351 | rs10025990 | 0.51 | 0.052089996 | 0.0992 |
| hCV27477533 | rs3756008 | hCV29877725 | rs4253295 | 0.51 | 0.052089996 | 0.248 |
| hCV27477533 | rs3756008 | hCV30492573 | rs10471184 | 0.51 | 0.052089996 | 0.0633 |
| hCV27477533 | rs3756008 | hCV30983902 | rs4862668 | 0.51 | 0.052089996 | 0.0836 |
| hCV27477533 | rs3756008 | hCV30983927 | rs6552962 | 0.51 | 0.052089996 | 0.0937 |
| hCV27477533 | rs3756008 | hCV32209629 | rs12715865 | 0.51 | 0.052089996 | 0.1094 |
| hCV27477533 | rs3756008 | hCV32209636 | rs11132387 | 0.51 | 0.052089996 | 0.3591 |
| hCV27477533 | rs3756008 | hCV32209637 | rs13143773 | 0.51 | 0.052089996 | 0.1889 |
| hCV27477533 | rs3756008 | hCV32209638 | rs12507040 | 0.51 | 0.052089996 | 0.19 |
| hCV27477533 | rs3756008 | hCV32291256 | rs4253406 | 0.51 | 0.052089996 | 0.1099 |
| hCV27477533 | rs3756008 | hCV32291269 | rs4253417 | 0.51 | 0.052089996 | 0.7459 |
| hCV27477533 | rs3756008 | hCV32291286 | rs4253422 | 0.51 | 0.052089996 | 0.145 |
| hCV27477533 | rs3756008 | hCV32291287 | rs4253423 | 0.51 | 0.052089996 | 0.145 |
| hCV27477533 | rs3756008 | hCV32291295 | rs4253292 | 0.51 | 0.052089996 | 0.0659 |
| hCV27477533 | rs3756008 | hCV3229991 | rs4241815 | 0.51 | 0.052089996 | 0.1577 |
| hCV27477533 | rs3756008 | hCV3229992 | rs3775298 | 0.51 | 0.052089996 | 0.1577 |
| hCV27477533 | rs3756008 | hCV3229995 | rs11132382 | 0.51 | 0.052089996 | 0.1702 |
| hCV27477533 | rs3756008 | hCV3230000 | rs4253294 | 0.51 | 0.052089996 | 0.0691 |
| hCV27477533 | rs3756008 | hCV3230002 | rs4253297 | 0.51 | 0.052089996 | 0.3082 |
| hCV27477533 | rs3756008 | hCV3230003 | rs2304595 | 0.51 | 0.052089996 | 0.3373 |
| hCV27477533 | rs3756008 | hCV3230004 | rs4253301 | 0.51 | 0.052089996 | 0.0562 |
| hCV27477533 | rs3756008 | hCV3230006 | rs4253308 | 0.51 | 0.052089996 | 0.248 |
| hCV27477533 | rs3756008 | hCV3230007 | rs4253311 | 0.51 | 0.052089996 | 0.1577 |
| hCV27477533 | rs3756008 | hCV3230010 | rs4253315 | 0.51 | 0.052089996 | 0.0836 |
| hCV27477533 | rs3756008 | hCV3230011 | rs4253320 | 0.51 | 0.052089996 | 0.3082 |
| hCV27477533 | rs3756008 | hCV3230013 | rs3775303 | 0.51 | 0.052089996 | 0.3791 |
| hCV27477533 | rs3756008 | hCV3230014 | rs4861709 | 0.51 | 0.052089996 | 0.0691 |
| hCV27477533 | rs3756008 | hCV3230016 | rs4253325 | 0.51 | 0.052089996 | 0.0821 |
| hCV27477533 | rs3756008 | hCV3230017 | rs4253327 | 0.51 | 0.052089996 | 0.117 |
| hCV27477533 | rs3756008 | hCV3230018 | rs925453 | 0.51 | 0.052089996 | 0.0596 |
| hCV27477533 | rs3756008 | hCV3230019 | rs4253332 | 0.51 | 0.052089996 | 0.0555 |
| hCV27477533 | rs3756008 | hCV3230021 | rs13135645 | 0.51 | 0.052089996 | 0.0833 |
| hCV27477533 | rs3756008 | hCV3230022 | rs11132383 | 0.51 | 0.052089996 | 0.3776 |
| hCV27477533 | rs3756008 | hCV3230025 | rs3756009 | 0.51 | 0.052089996 | 1 |
| hCV27477533 | rs3756008 | hCV3230030 | rs4253408 | 0.51 | 0.052089996 | 0.1104 |
| hCV27477533 | rs3756008 | hCV3230031 | rs4253419 | 0.51 | 0.052089996 | 0.145 |
| hCV27477533 | rs3756008 | hCV3230038 | rs2289252 | 0.51 | 0.052089996 | 0.7249 |
| hCV27477533 | rs3756008 | hCV3230051 | rs4862658 | 0.51 | 0.052089996 | 0.0568 |
| hCV27477533 | rs3756008 | hCV3230083 | rs10013653 | 0.51 | 0.052089996 | 0.3055 |
| hCV27477533 | rs3756008 | hCV3230084 | rs7682918 | 0.51 | 0.052089996 | 0.2208 |
| hCV27477533 | rs3756008 | hCV3230094 | rs7687818 | 0.51 | 0.052089996 | 0.3169 |
| hCV27477533 | rs3756008 | hCV3230096 | rs3817184 | 0.51 | 0.052089996 | 0.2279 |
| hCV27477533 | rs3756008 | hCV3230097 | rs3736455 | 0.51 | 0.052089996 | 0.2223 |
| hCV27477533 | rs3756008 | hCV3230101 | rs6835839 | 0.51 | 0.052089996 | 0.0923 |
| hCV27477533 | rs3756008 | hCV3230106 | rs1473597 | 0.51 | 0.052089996 | 0.1308 |
| hCV27477533 | rs3756008 | hCV3230110 | rs2276917 | 0.51 | 0.052089996 | 0.1218 |
| hCV27477533 | rs3756008 | hCV3230113 | rs1053094 | 0.51 | 0.052089996 | 0.2208 |
| hCV27477533 | rs3756008 | hCV3230118 | rs4253429 | 0.51 | 0.052089996 | 0.145 |
| hCV27477533 | rs3756008 | hCV3230119 | rs4253430 | 0.51 | 0.052089996 | 0.2733 |
| hCV27477533 | rs3756008 | hCV3230125 | rs11938564 | 0.51 | 0.052089996 | 0.1934 |
| hCV27477533 | rs3756008 | hCV3230131 | rs13136269 | 0.51 | 0.052089996 | 0.19 |
| hCV27477533 | rs3756008 | hCV3230133 | rs12511874 | 0.51 | 0.052089996 | 0.1373 |
| hCV27477533 | rs3756008 | hCV3230134 | rs12500151 | 0.51 | 0.052089996 | 0.196 |
| hCV27477533 | rs3756008 | hCV3230136 | rs13116273 | 0.51 | 0.052089996 | 0.1995 |
| hCV27477533 | rs3756008 | hCV32313006 | rs4253248 | 0.51 | 0.052089996 | 0.1794 |
| hCV27477533 | rs3756008 | hCV32313007 | rs4862666 | 0.51 | 0.052089996 | 0.067 |
| hCV27477533 | rs3756008 | hCV32313014 | rs4253243 | 0.51 | 0.052089996 | 0.1183 |
| hCV27477533 | rs3756008 | hCV32313024 | rs4253239 | 0.51 | 0.052089996 | 0.0659 |
| hCV27477533 | rs3756008 | hCV32358975 | rs4253255 | 0.51 | 0.052089996 | 0.1561 |
| hCV27477533 | rs3756008 | hCV32358984 | rs4253256 | 0.51 | 0.052089996 | 0.0676 |
| hCV27477533 | rs3756008 | hCV8241628 | rs907439 | 0.51 | 0.052089996 | 0.1028 |
| hCV27477533 | rs3756008 | hCV8241630 | rs925451 | 0.51 | 0.052089996 | 0.9804 |
| hCV27477533 | rs3756008 | hCV8241631 | rs1511802 | 0.51 | 0.052089996 | 0.265 |
| hCV27477533 | rs3756008 | hCV8241632 | rs1511801 | 0.51 | 0.052089996 | 0.1877 |
| hCV27477533 | rs3756008 | hCV8241633 | rs1511800 | 0.51 | 0.052089996 | 0.067 |
| hCV27477533 | rs3756008 | hDV68550952 | rs4253289 | 0.51 | 0.052089996 | 0.0687 |
| hCV27477533 | rs3756008 | hDV71222711 | rs4253252 | 0.51 | 0.052089996 | 0.1794 |
| hCV27859399 | rs7853989 | hCV11840510 | rs9411367 | 0.51 | 0.17565711 | 0.389 |
| hCV27859399 | rs7853989 | hCV153353 | rs7469576 | 0.51 | 0.17565711 | 0.4123 |
| hCV27859399 | rs7853989 | hCV16199728 | rs3025336 | 0.51 | 0.17565711 | 0.1833 |
| hCV27859399 | rs7853989 | hCV25610771 | rs8176751 | 0.51 | 0.17565711 | 1 |
| hCV27859399 | rs7853989 | hCV25610772 | rs8176746 | 0.51 | 0.17565711 | 0.817 |
| hCV27859399 | rs7853989 | hCV25610773 | rs8176747 | 0.51 | 0.17565711 | 0.6864 |
| hCV27859399 | rs7853989 | hCV25610781 | rs8176749 | 0.51 | 0.17565711 | 0.817 |
| hCV27859399 | rs7853989 | hCV25610791 | rs8176743 | 0.51 | 0.17565711 | 0.8167 |
| hCV27859399 | rs7853989 | hCV25610857 | rs8176693 | 0.51 | 0.17565711 | 0.817 |
| hCV27859399 | rs7853989 | hCV25987572 | rs4310274 | 0.51 | 0.17565711 | 0.297 |
| hCV27859399 | rs7853989 | hCV26744892 | rs11244079 | 0.51 | 0.17565711 | 0.6338 |
| hCV27859399 | rs7853989 | hCV27224736 | rs2073870 | 0.51 | 0.17565711 | 0.297 |
| hCV27859399 | rs7853989 | hCV27224742 | rs4454354 | 0.51 | 0.17565711 | 0.2157 |
| hCV27859399 | rs7853989 | hCV27224746 | rs10793959 | 0.51 | 0.17565711 | 0.2143 |
| hCV27859399 | rs7853989 | hCV27224748 | rs4246169 | 0.51 | 0.17565711 | 0.3057 |
| hCV27859399 | rs7853989 | hCV27224776 | rs7852396 | 0.51 | 0.17565711 | 0.3126 |
| hCV27859399 | rs7853989 | hCV27224778 | rs11244041 | 0.51 | 0.17565711 | 0.2967 |
| hCV27859399 | rs7853989 | hCV27478783 | rs3761823 | 0.51 | 0.17565711 | 0.2284 |
| hCV27859399 | rs7853989 | hCV27886018 | rs4962104 | 0.51 | 0.17565711 | 0.2137 |
| hCV27859399 | rs7853989 | hCV27936941 | rs4379511 | 0.51 | 0.17565711 | 0.2938 |
| hCV27859399 | rs7853989 | hCV27936942 | rs4424335 | 0.51 | 0.17565711 | 0.7126 |
| hCV27859399 | rs7853989 | hCV28002068 | rs4322078 | 0.51 | 0.17565711 | 0.3057 |
| hCV27859399 | rs7853989 | hCV29393501 | rs4507838 | 0.51 | 0.17565711 | 0.2887 |
| hCV27859399 | rs7853989 | hCV29393505 | rs4962039 | 0.51 | 0.17565711 | 0.5726 |
| hCV27859399 | rs7853989 | hCV29393508 | rs7046863 | 0.51 | 0.17565711 | 0.4137 |
| hCV27859399 | rs7853989 | hCV29531061 | rs9411464 | 0.51 | 0.17565711 | 0.6331 |
| hCV27859399 | rs7853989 | hCV29549191 | rs9411468 | 0.51 | 0.17565711 | 0.4432 |
| hCV27859399 | rs7853989 | hCV29597378 | rs8176672 | 0.51 | 0.17565711 | 0.817 |
| hCV27859399 | rs7853989 | hCV29711974 | rs7855466 | 0.51 | 0.17565711 | 0.3655 |
| hCV27859399 | rs7853989 | hCV2980259 | rs3761821 | 0.51 | 0.17565711 | 0.2256 |
| hCV27859399 | rs7853989 | hCV30504633 | rs9919007 | 0.51 | 0.17565711 | 0.4396 |
| hCV27859399 | rs7853989 | hCV30613004 | rs7855713 | 0.51 | 0.17565711 | 0.6426 |
| hCV27859399 | rs7853989 | hCV3183094 | rs8176731 | 0.51 | 0.17565711 | 0.1975 |
| hCV27859399 | rs7853989 | hCV3183096 | rs8176730 | 0.51 | 0.17565711 | 1 |
| hCV27859399 | rs7853989 | hCV3183097 | rs8176725 | 0.51 | 0.17565711 | 1 |
| hCV27859399 | rs7853989 | hCV3183098 | rs2073824 | 0.51 | 0.17565711 | 0.1773 |
| hCV27859399 | rs7853989 | hCV3183099 | rs8176722 | 0.51 | 0.17565711 | 1 |
| hCV27859399 | rs7853989 | hCV3183100 | rs8176720 | 0.51 | 0.17565711 | 0.2078 |
| hCV27859399 | rs7853989 | hCV3183111 | rs643434 | 0.51 | 0.17565711 | 0.1852 |
| hCV27859399 | rs7853989 | hCV3183246 | rs10901263 | 0.51 | 0.17565711 | 0.2412 |
| hCV27859399 | rs7853989 | hCV32126435 | rs11244034 | 0.51 | 0.17565711 | 0.297 |
| hCV27859399 | rs7853989 | hCV32126442 | rs7864821 | 0.51 | 0.17565711 | 0.2143 |
| hCV27859399 | rs7853989 | hCV32126443 | rs10793957 | 0.51 | 0.17565711 | 0.2286 |
| hCV27859399 | rs7853989 | hCV32126447 | rs6597610 | 0.51 | 0.17565711 | 0.2143 |
| hCV27859399 | rs7853989 | hCV32126454 | rs13300535 | 0.51 | 0.17565711 | 0.2888 |
| hCV27859399 | rs7853989 | hCV32126487 | rs10901250 | 0.51 | 0.17565711 | 0.3729 |
| hCV27859399 | rs7853989 | hCV442675 | rs9411471 | 0.51 | 0.17565711 | 0.4137 |
| hCV27859399 | rs7853989 | hCV7481808 | rs886082 | 0.51 | 0.17565711 | 0.2759 |
| hCV27859399 | rs7853989 | hCV7948166 | rs9411463 | 0.51 | 0.17565711 | 0.7297 |
| hCV27859399 | rs7853989 | hCV7948171 | rs4246170 | 0.51 | 0.17565711 | 0.6426 |
| hCV27859399 | rs7853989 | hCV9327931 | rs17150482 | 0.51 | 0.17565711 | 0.1872 |
| hCV27859399 | rs7853989 | hCV997907 | rs657152 | 0.51 | 0.17565711 | 0.2 |
| hCV27859399 | rs7853989 | hCV997909 | rs644234 | 0.51 | 0.17565711 | 0.2 |
| hCV27902808 | rs4253236 | hCV11786147 | rs4862662 | 0.51 | 0.163416276 | 0.2369 |
| hCV27902808 | rs4253236 | hCV11786203 | rs4253251 | 0.51 | 0.163416276 | 0.3848 |
| hCV27902808 | rs4253236 | hCV11786258 | rs4253303 | 0.51 | 0.163416276 | 0.366 |
| hCV27902808 | rs4253236 | hCV11786259 | rs4253304 | 0.51 | 0.163416276 | 0.4346 |
| hCV27902808 | rs4253236 | hCV11786327 | rs13133050 | 0.51 | 0.163416276 | 0.1961 |
| hCV27902808 | rs4253236 | hCV12066118 | rs2048 | 0.51 | 0.163416276 | 0.6716 |
| hCV27902808 | rs4253236 | hCV12066119 | rs1912826 | 0.51 | 0.163416276 | 0.6075 |
| hCV27902808 | rs4253236 | hCV12066124 | rs2036914 | 0.51 | 0.163416276 | 0.1725 |
| hCV27902808 | rs4253236 | hCV12066129 | rs1593 | 0.51 | 0.163416276 | 0.2043 |
| hCV27902808 | rs4253236 | hCV15968025 | rs2292425 | 0.51 | 0.163416276 | 0.399 |
| hCV27902808 | rs4253236 | hCV15968026 | rs2292426 | 0.51 | 0.163416276 | 0.4275 |
| hCV27902808 | rs4253236 | hCV15968043 | rs2292423 | 0.51 | 0.163416276 | 0.4376 |
| hCV27902808 | rs4253236 | hCV15975109 | rs2304596 | 0.51 | 0.163416276 | 0.364 |
| hCV27902808 | rs4253236 | hCV2103392 | rs12500826 | 0.51 | 0.163416276 | 0.192 |
| hCV27902808 | rs4253236 | hCV22271609 | rs4253326 | 0.51 | 0.163416276 | 0.3079 |
| hCV27902808 | rs4253236 | hCV22272267 | rs3733402 | 0.51 | 0.163416276 | 0.6716 |
| hCV27902808 | rs4253236 | hCV25634781 | rs4253299 | 0.51 | 0.163416276 | 0.3286 |
| hCV27902808 | rs4253236 | hCV25989001 | hCV25989001 | 0.51 | 0.163416276 | 0.3848 |
| hCV27902808 | rs4253236 | hCV25990131 | rs13146272 | 0.51 | 0.163416276 | 0.3974 |
| hCV27902808 | rs4253236 | hCV26265197 | rs10014399 | 0.51 | 0.163416276 | 0.3848 |
| hCV27902808 | rs4253236 | hCV26265199 | rs2221843 | 0.51 | 0.163416276 | 0.3286 |
| hCV27902808 | rs4253236 | hCV26265231 | rs7684025 | 0.51 | 0.163416276 | 0.3223 |
| hCV27902808 | rs4253236 | hCV27482765 | rs3775301 | 0.51 | 0.163416276 | 0.364 |
| hCV27902808 | rs4253236 | hCV27506149 | rs3822055 | 0.51 | 0.163416276 | 0.3286 |
| hCV27902808 | rs4253236 | hCV29053260 | rs4861707 | 0.51 | 0.163416276 | 0.164 |
| hCV27902808 | rs4253236 | hCV29053264 | rs7667777 | 0.51 | 0.163416276 | 0.2382 |
| hCV27902808 | rs4253236 | hCV29053265 | rs4253244 | 0.51 | 0.163416276 | 0.9634 |
| hCV27902808 | rs4253236 | hCV29718000 | rs4253238 | 0.51 | 0.163416276 | 0.6557 |
| hCV27902808 | rs4253236 | hCV29826351 | rs10025990 | 0.51 | 0.163416276 | 0.2048 |
| hCV27902808 | rs4253236 | hCV29877725 | rs4253295 | 0.51 | 0.163416276 | 0.3822 |
| hCV27902808 | rs4253236 | hCV32291217 | rs4253323 | 0.51 | 0.163416276 | 0.364 |
| hCV27902808 | rs4253236 | hCV32291295 | rs4253292 | 0.51 | 0.163416276 | 0.4307 |
| hCV27902808 | rs4253236 | hCV32291301 | rs4253302 | 0.51 | 0.163416276 | 0.3677 |
| hCV27902808 | rs4253236 | hCV32295028 | rs4253260 | 0.51 | 0.163416276 | 0.364 |
| hCV27902808 | rs4253236 | hCV3229991 | rs4241815 | 0.51 | 0.163416276 | 0.6716 |
| hCV27902808 | rs4253236 | hCV3229992 | rs3775298 | 0.51 | 0.163416276 | 0.6716 |
| hCV27902808 | rs4253236 | hCV3229995 | rs11132382 | 0.51 | 0.163416276 | 0.6412 |
| hCV27902808 | rs4253236 | hCV3230002 | rs4253297 | 0.51 | 0.163416276 | 0.3878 |
| hCV27902808 | rs4253236 | hCV3230003 | rs2304595 | 0.51 | 0.163416276 | 0.4392 |
| hCV27902808 | rs4253236 | hCV3230006 | rs4253308 | 0.51 | 0.163416276 | 0.3822 |
| hCV27902808 | rs4253236 | hCV3230007 | rs4253311 | 0.51 | 0.163416276 | 0.6716 |
| hCV27902808 | rs4253236 | hCV3230011 | rs4253320 | 0.51 | 0.163416276 | 0.3878 |
| hCV27902808 | rs4253236 | hCV3230012 | rs4241821 | 0.51 | 0.163416276 | 0.3286 |
| hCV27902808 | rs4253236 | hCV3230013 | rs3775303 | 0.51 | 0.163416276 | 0.4346 |
| hCV27902808 | rs4253236 | hCV3230083 | rs10013653 | 0.51 | 0.163416276 | 0.2827 |
| hCV27902808 | rs4253236 | hCV3230084 | rs7682918 | 0.51 | 0.163416276 | 0.2441 |
| hCV27902808 | rs4253236 | hCV3230094 | rs7687818 | 0.51 | 0.163416276 | 0.2896 |
| hCV27902808 | rs4253236 | hCV3230096 | rs3817184 | 0.51 | 0.163416276 | 0.2369 |
| hCV27902808 | rs4253236 | hCV3230097 | rs3736455 | 0.51 | 0.163416276 | 0.4807 |
| hCV27902808 | rs4253236 | hCV3230113 | rs1053094 | 0.51 | 0.163416276 | 0.3483 |
| hCV27902808 | rs4253236 | hCV32313006 | rs4253248 | 0.51 | 0.163416276 | 0.6434 |
| hCV27902808 | rs4253236 | hCV32313024 | rs4253239 | 0.51 | 0.163416276 | 0.4307 |
| hCV27902808 | rs4253236 | hCV32358975 | rs4253255 | 0.51 | 0.163416276 | 0.6676 |
| hCV27902808 | rs4253236 | hCV32358984 | rs4253256 | 0.51 | 0.163416276 | 1 |
| hCV27902808 | rs4253236 | hCV8241631 | rs1511802 | 0.51 | 0.163416276 | 0.3786 |
| hCV27902808 | rs4253236 | hCV8241632 | rs1511801 | 0.51 | 0.163416276 | 0.6346 |
| hCV27902808 | rs4253236 | hDV71222711 | rs4253252 | 0.51 | 0.163416276 | 0.6434 |
| hCV2892877 | rs6050 | hCV11503382 | rs1873369 | 0.51 | 0.118446629 | 0.2903 |
| hCV2892877 | rs6050 | hCV11503414 | rs2066865 | 0.51 | 0.118446629 | 0.873 |
| hCV2892877 | rs6050 | hCV11503416 | rs2066864 | 0.51 | 0.118446629 | 0.8694 |
| hCV2892877 | rs6050 | hCV11503431 | rs2066861 | 0.51 | 0.118446629 | 0.8734 |
| hCV2892877 | rs6050 | hCV11503469 | rs2066854 | 0.51 | 0.118446629 | 0.8287 |
| hCV2892877 | rs6050 | hCV11503470 | rs1800788 | 0.51 | 0.118446629 | 0.5042 |
| hCV2892877 | rs6050 | hCV11853378 | rs1907154 | 0.51 | 0.118446629 | 0.1345 |
| hCV2892877 | rs6050 | hCV11853384 | rs12646456 | 0.51 | 0.118446629 | 0.1345 |
| hCV2892877 | rs6050 | hCV11853387 | rs1490683 | 0.51 | 0.118446629 | 0.1884 |
| hCV2892877 | rs6050 | hCV11853483 | rs12644950 | 0.51 | 0.118446629 | 0.863 |
| hCV2892877 | rs6050 | hCV11853489 | rs7681423 | 0.51 | 0.118446629 | 0.8694 |
| hCV2892877 | rs6050 | hCV11853496 | rs7654093 | 0.51 | 0.118446629 | 0.8734 |
| hCV2892877 | rs6050 | hCV11853631 | rs12651106 | 0.51 | 0.118446629 | 0.1417 |
| hCV2892877 | rs6050 | hCV1190572 | rs1032335 | 0.51 | 0.118446629 | 0.1345 |
| hCV2892877 | rs6050 | hCV15860433 | rs2070006 | 0.51 | 0.118446629 | 0.4576 |
| hCV2892877 | rs6050 | hCV21680 | rs7666020 | 0.51 | 0.118446629 | 0.1673 |
| hCV2892877 | rs6050 | hCV21681 | rs6536018 | 0.51 | 0.118446629 | 0.2886 |
| hCV2892877 | rs6050 | hCV24834 | rs4235247 | 0.51 | 0.118446629 | 0.4645 |
| hCV2892877 | rs6050 | hCV26019871 | rs4547780 | 0.51 | 0.118446629 | 0.3118 |
| hCV2892877 | rs6050 | hCV26024202 | rs11731813 | 0.51 | 0.118446629 | 0.2608 |
| hCV2892877 | rs6050 | hCV265748 | rs12500118 | 0.51 | 0.118446629 | 0.1425 |
| hCV2892877 | rs6050 | hCV27020269 | rs7659613 | 0.51 | 0.118446629 | 0.4867 |
| hCV2892877 | rs6050 | hCV27020277 | rs6825454 | 0.51 | 0.118446629 | 0.948 |
| hCV2892877 | rs6050 | hCV27020280 | rs4463047 | 0.51 | 0.118446629 | 0.2695 |
| hCV2892877 | rs6050 | hCV27905214 | rs4323084 | 0.51 | 0.118446629 | 0.3304 |
| hCV2892877 | rs6050 | hCV27907560 | rs4696576 | 0.51 | 0.118446629 | 0.1284 |
| hCV2892877 | rs6050 | hCV27937396 | rs4634201 | 0.51 | 0.118446629 | 0.4655 |
| hCV2892877 | rs6050 | hCV286004 | rs1118824 | 0.51 | 0.118446629 | 0.1344 |
| hCV2892877 | rs6050 | hCV2892855 | rs6536024 | 0.51 | 0.118446629 | 0.1935 |
| hCV2892877 | rs6050 | hCV2892858 | rs12648395 | 0.51 | 0.118446629 | 0.1344 |
| hCV2892877 | rs6050 | hCV2892859 | rs13130318 | 0.51 | 0.118446629 | 0.7297 |
| hCV2892877 | rs6050 | hCV2892863 | rs1049636 | 0.51 | 0.118446629 | 0.1344 |
| hCV2892877 | rs6050 | hCV2892869 | rs13109457 | 0.51 | 0.118446629 | 0.9105 |
| hCV2892877 | rs6050 | hCV2892870 | rs2070011 | 0.51 | 0.118446629 | 0.477 |
| hCV2892877 | rs6050 | hCV2892893 | rs12648258 | 0.51 | 0.118446629 | 0.4392 |
| hCV2892877 | rs6050 | hCV2892905 | rs12642770 | 0.51 | 0.118446629 | 0.4305 |
| hCV2892877 | rs6050 | hCV2892918 | rs12511469 | 0.51 | 0.118446629 | 0.4276 |
| hCV2892877 | rs6050 | hCV2892923 | rs13435192 | 0.51 | 0.118446629 | 0.1513 |
| hCV2892877 | rs6050 | hCV2892924 | rs13435101 | 0.51 | 0.118446629 | 0.15 |
| hCV2892877 | rs6050 | hCV2892925 | rs7689945 | 0.51 | 0.118446629 | 0.1457 |
| hCV2892877 | rs6050 | hCV2892926 | rs7662567 | 0.51 | 0.118446629 | 0.4373 |
| hCV2892877 | rs6050 | hCV2892927 | rs13123551 | 0.51 | 0.118446629 | 0.1818 |
| hCV2892877 | rs6050 | hCV2892928 | rs13147579 | 0.51 | 0.118446629 | 0.4507 |
| hCV2892877 | rs6050 | hCV28953838 | rs7690851 | 0.51 | 0.118446629 | 0.3195 |
| hCV2892877 | rs6050 | hCV28953840 | rs6536017 | 0.51 | 0.118446629 | 0.1303 |
| hCV2892877 | rs6050 | hCV28966638 | rs7676857 | 0.51 | 0.118446629 | 0.1381 |
| hCV2892877 | rs6050 | hCV29420822 | rs4642230 | 0.51 | 0.118446629 | 0.5295 |
| hCV2892877 | rs6050 | hCV29983641 | rs10008078 | 0.51 | 0.118446629 | 0.5304 |
| hCV2892877 | rs6050 | hCV30679164 | rs12649437 | 0.51 | 0.118446629 | 0.1198 |
| hCV2892877 | rs6050 | hCV30679170 | rs13148992 | 0.51 | 0.118446629 | 0.2697 |
| hCV2892877 | rs6050 | hCV30711231 | rs12642469 | 0.51 | 0.118446629 | 0.5304 |
| hCV2892877 | rs6050 | hCV31863979 | rs12186294 | 0.51 | 0.118446629 | 0.212 |
| hCV2892877 | rs6050 | hCV31863982 | rs7659024 | 0.51 | 0.118446629 | 0.8734 |
| hCV2892877 | rs6050 | hCV32212659 | rs4622984 | 0.51 | 0.118446629 | 0.2094 |
| hCV2892877 | rs6050 | hCV354895 | rs11737226 | 0.51 | 0.118446629 | 0.2405 |
| hCV2892877 | rs6050 | hCV354896 | rs7690972 | 0.51 | 0.118446629 | 0.2405 |
| hCV2892877 | rs6050 | hCV426173 | rs12504201 | 0.51 | 0.118446629 | 0.1904 |
| hCV2892877 | rs6050 | hCV426175 | rs9884952 | 0.51 | 0.118446629 | 0.1345 |
| hCV2892877 | rs6050 | hCV426176 | rs9884775 | 0.51 | 0.118446629 | 0.1345 |
| hCV2892877 | rs6050 | hCV426178 | rs9884570 | 0.51 | 0.118446629 | 0.123 |
| hCV2892877 | rs6050 | hCV426181 | rs11099955 | 0.51 | 0.118446629 | 0.1345 |
| hCV2892877 | rs6050 | hCV426182 | rs10014536 | 0.51 | 0.118446629 | 0.1443 |
| hCV2892877 | rs6050 | hCV426183 | rs10014635 | 0.51 | 0.118446629 | 0.1452 |
| hCV2892877 | rs6050 | hCV426184 | rs1032336 | 0.51 | 0.118446629 | 0.1345 |
| hCV2892877 | rs6050 | hCV470979 | rs1490672 | 0.51 | 0.118446629 | 0.2588 |
| hCV2892877 | rs6050 | hCV7429780 | rs1800792 | 0.51 | 0.118446629 | 0.1939 |
| hCV2892877 | rs6050 | hCV7429782 | rs1118823 | 0.51 | 0.118446629 | 0.1313 |
| hCV2892877 | rs6050 | hCV7429793 | rs1025154 | 0.51 | 0.118446629 | 0.5304 |
| hCV2892877 | rs6050 | hCV7430148 | rs1490685 | 0.51 | 0.118446629 | 0.1345 |
| hCV2892877 | rs6050 | hCV7430158 | rs1466662 | 0.51 | 0.118446629 | 0.1425 |
| hCV2892877 | rs6050 | hDV70945235 | rs17373860 | 0.51 | 0.118446629 | 0.2179 |
| hCV2915511 | rs627530 | hCV11470250 | rs678276 | 0.51 | 0.808781214 | 1 |
| hCV2915511 | rs627530 | hCV2406318 | rs661315 | 0.51 | 0.808781214 | 1 |
| hCV2915511 | rs627530 | hCV2414147 | rs681747 | 0.51 | 0.808781214 | 1 |
| hCV2915511 | rs627530 | hCV2414148 | rs620698 | 0.51 | 0.808781214 | 1 |
| hCV2915511 | rs627530 | hCV2414150 | rs675291 | 0.51 | 0.808781214 | 1 |
| hCV2915511 | rs627530 | hCV31716873 | rs13403516 | 0.51 | 0.808781214 | 1 |
| hCV2915511 | rs627530 | hCV7540 | rs633200 | 0.51 | 0.808781214 | 1 |
| hCV2915511 | rs627530 | hCV8840562 | rs668034 | 0.51 | 0.808781214 | 1 |
| hCV2986566 | rs4149755 | hCV1264349 | rs12557491 | 0.51 | 0.454330944 | 0.6651 |
| hCV2986566 | rs4149755 | hCV29394017 | rs7058459 | 0.51 | 0.454330944 | 0.4683 |
| hCV30562347 | rs4253418 | hCV11786295 | rs4253421 | 0.51 | 0.434589475 | 0.4975 |
| hCV30562347 | rs4253418 | hCV12066129 | rs1593 | 0.51 | 0.434589475 | 0.4706 |
| hCV30562347 | rs4253418 | hCV29826351 | rs10025990 | 0.51 | 0.434589475 | 0.5058 |
| hCV30690777 | rs12045585 | hCV15760229 | rs3006939 | 0.51 | 0.480095851 | 0.4853 |
| hCV30690777 | rs12045585 | hCV15760280 | rs3006940 | 0.51 | 0.480095851 | 0.4853 |
| hCV30690777 | rs12045585 | hCV26034158 | rs4515770 | 0.51 | 0.480095851 | 0.4853 |
| hCV30690777 | rs12045585 | hCV29210363 | rs6656918 | 0.51 | 0.480095851 | 0.4853 |
| hCV30690777 | rs12045585 | hCV30690778 | rs12140414 | 0.51 | 0.480095851 | 0.5671 |
| hCV30690777 | rs12045585 | hCV30690780 | rs10737888 | 0.51 | 0.480095851 | 0.4853 |
| hCV30690777 | rs12045585 | hCV8688111 | rs1578275 | 0.51 | 0.480095851 | 0.5671 |
| hCV30690777 | rs12045585 | hCV97631 | rs1538773 | 0.51 | 0.480095851 | 0.4853 |
| hCV30690780 | rs10737888 | hCV12073160 | rs1973284 | 0.51 | 0.262666713 | 0.4193 |
| hCV30690780 | rs10737888 | hCV12073167 | rs2034915 | 0.51 | 0.262666713 | 0.4232 |
| hCV30690780 | rs10737888 | hCV12073172 | rs971285 | 0.51 | 0.262666713 | 0.4257 |
| hCV30690780 | rs10737888 | hCV12073836 | rs1008173 | 0.51 | 0.262666713 | 0.2647 |
| hCV30690780 | rs10737888 | hCV12073840 | rs14403 | 0.51 | 0.262666713 | 0.5374 |
| hCV30690780 | rs10737888 | hCV15755277 | rs3008657 | 0.51 | 0.262666713 | 0.3711 |
| hCV30690780 | rs10737888 | hCV15760229 | rs3006939 | 0.51 | 0.262666713 | 1 |
| hCV30690780 | rs10737888 | hCV15760238 | rs3006936 | 0.51 | 0.262666713 | 1 |
| hCV30690780 | rs10737888 | hCV15760239 | rs3006923 | 0.51 | 0.262666713 | 0.4737 |
| hCV30690780 | rs10737888 | hCV15760280 | rs3006940 | 0.51 | 0.262666713 | 1 |
| hCV30690780 | rs10737888 | hCV15776869 | rs2345994 | 0.51 | 0.262666713 | 0.4139 |
| hCV30690780 | rs10737888 | hCV15823024 | rs2125230 | 0.51 | 0.262666713 | 0.763 |
| hCV30690780 | rs10737888 | hCV15823033 | rs2125231 | 0.51 | 0.262666713 | 0.4257 |
| hCV30690780 | rs10737888 | hCV15885425 | rs2290754 | 0.51 | 0.262666713 | 0.763 |
| hCV30690780 | rs10737888 | hCV15885435 | rs2290753 | 0.51 | 0.262666713 | 0.4257 |
| hCV30690780 | rs10737888 | hCV15953062 | rs2953330 | 0.51 | 0.262666713 | 0.3229 |
| hCV30690780 | rs10737888 | hCV15953063 | rs2953331 | 0.51 | 0.262666713 | 0.3293 |
| hCV30690780 | rs10737888 | hCV15965328 | rs2291409 | 0.51 | 0.262666713 | 0.4454 |
| hCV30690780 | rs10737888 | hCV15965338 | rs2291410 | 0.51 | 0.262666713 | 0.7354 |
| hCV30690780 | rs10737888 | hCV16082410 | rs2881275 | 0.51 | 0.262666713 | 0.6818 |
| hCV30690780 | rs10737888 | hCV1678656 | rs1458024 | 0.51 | 0.262666713 | 0.6818 |
| hCV30690780 | rs10737888 | hCV1678668 | rs1379700 | 0.51 | 0.262666713 | 0.3257 |
| hCV30690780 | rs10737888 | hCV1678674 | rs1458023 | 0.51 | 0.262666713 | 0.7493 |
| hCV30690780 | rs10737888 | hCV1678683 | rs1486475 | 0.51 | 0.262666713 | 0.3257 |
| hCV30690780 | rs10737888 | hCV1678687 | rs320305 | 0.51 | 0.262666713 | 0.6181 |
| hCV30690780 | rs10737888 | hCV1678723 | rs1486472 | 0.51 | 0.262666713 | 0.3224 |
| hCV30690780 | rs10737888 | hCV233148 | rs1417121 | 0.51 | 0.262666713 | 0.6414 |
| hCV30690780 | rs10737888 | hCV26034142 | rs9428576 | 0.51 | 0.262666713 | 0.3104 |
| hCV30690780 | rs10737888 | hCV26034157 | rs2994329 | 0.51 | 0.262666713 | 0.2668 |
| hCV30690780 | rs10737888 | hCV26034158 | rs4515770 | 0.51 | 0.262666713 | 1 |
| hCV30690780 | rs10737888 | hCV26034160 | rs2994327 | 0.51 | 0.262666713 | 0.4781 |
| hCV30690780 | rs10737888 | hCV26719082 | rs10927046 | 0.51 | 0.262666713 | 0.6045 |
| hCV30690780 | rs10737888 | hCV26719085 | rs10927047 | 0.51 | 0.262666713 | 0.635 |
| hCV30690780 | rs10737888 | hCV26719086 | rs4658585 | 0.51 | 0.262666713 | 0.4054 |
| hCV30690780 | rs10737888 | hCV26719087 | rs4658401 | 0.51 | 0.262666713 | 0.2676 |
| hCV30690780 | rs10737888 | hCV26719107 | rs7538011 | 0.51 | 0.262666713 | 0.6653 |
| hCV30690780 | rs10737888 | hCV26719108 | rs10927035 | 0.51 | 0.262666713 | 0.5743 |
| hCV30690780 | rs10737888 | hCV26719113 | rs7517340 | 0.51 | 0.262666713 | 0.617 |
| hCV30690780 | rs10737888 | hCV26719114 | rs7549780 | 0.51 | 0.262666713 | 0.4257 |
| hCV30690780 | rs10737888 | hCV26719116 | rs10927039 | 0.51 | 0.262666713 | 0.7747 |
| hCV30690780 | rs10737888 | hCV26719117 | rs12144559 | 0.51 | 0.262666713 | 0.4257 |
| hCV30690780 | rs10737888 | hCV26719120 | rs10927040 | 0.51 | 0.262666713 | 0.7881 |
| hCV30690780 | rs10737888 | hCV26719121 | rs10927041 | 0.51 | 0.262666713 | 0.7881 |
| hCV30690780 | rs10737888 | hCV26719137 | rs12136847 | 0.51 | 0.262666713 | 0.4257 |
| hCV30690780 | rs10737888 | hCV26719149 | rs6675851 | 0.51 | 0.262666713 | 0.763 |
| hCV30690780 | rs10737888 | hCV26719162 | rs4132509 | 0.51 | 0.262666713 | 0.763 |
| hCV30690780 | rs10737888 | hCV26719163 | rs6429435 | 0.51 | 0.262666713 | 0.4257 |
| hCV30690780 | rs10737888 | hCV26719171 | rs10927075 | 0.51 | 0.262666713 | 0.4054 |
| hCV30690780 | rs10737888 | hCV26719176 | rs10927076 | 0.51 | 0.262666713 | 0.763 |
| hCV30690780 | rs10737888 | hCV26719179 | rs6672195 | 0.51 | 0.262666713 | 0.4257 |
| hCV30690780 | rs10737888 | hCV26719192 | rs10803161 | 0.51 | 0.262666713 | 0.7097 |
| hCV30690780 | rs10737888 | hCV26719194 | rs10927081 | 0.51 | 0.262666713 | 0.4257 |
| hCV30690780 | rs10737888 | hCV26719197 | rs4590656 | 0.51 | 0.262666713 | 0.4257 |
| hCV30690780 | rs10737888 | hCV26719201 | rs4478795 | 0.51 | 0.262666713 | 0.4255 |
| hCV30690780 | rs10737888 | hCV26719202 | rs4658588 | 0.51 | 0.262666713 | 0.4232 |
| hCV30690780 | rs10737888 | hCV26719215 | rs12144546 | 0.51 | 0.262666713 | 0.4257 |
| hCV30690780 | rs10737888 | hCV26719217 | rs7548254 | 0.51 | 0.262666713 | 0.4257 |
| hCV30690780 | rs10737888 | hCV26719219 | rs9782958 | 0.51 | 0.262666713 | 0.7247 |
| hCV30690780 | rs10737888 | hCV26719222 | rs4553169 | 0.51 | 0.262666713 | 0.763 |
| hCV30690780 | rs10737888 | hCV26719225 | rs11586029 | 0.51 | 0.262666713 | 0.4257 |
| hCV30690780 | rs10737888 | hCV26719227 | rs10927065 | 0.51 | 0.262666713 | 0.6111 |
| hCV30690780 | rs10737888 | hCV26719232 | rs10803158 | 0.51 | 0.262666713 | 0.7586 |
| hCV30690780 | rs10737888 | hCV26719233 | rs10927067 | 0.51 | 0.262666713 | 0.763 |
| hCV30690780 | rs10737888 | hCV27170898 | rs12753750 | 0.51 | 0.262666713 | 0.3576 |
| hCV30690780 | rs10737888 | hCV27171350 | rs4430311 | 0.51 | 0.262666713 | 0.3794 |
| hCV30690780 | rs10737888 | hCV27498250 | rs3766673 | 0.51 | 0.262666713 | 0.7605 |
| hCV30690780 | rs10737888 | hCV29210363 | rs6656918 | 0.51 | 0.262666713 | 1 |
| hCV30690780 | rs10737888 | hCV29542869 | rs7534117 | 0.51 | 0.262666713 | 0.7586 |
| hCV30690780 | rs10737888 | hCV29560960 | rs7519673 | 0.51 | 0.262666713 | 0.6181 |
| hCV30690780 | rs10737888 | hCV29741723 | rs7517921 | 0.51 | 0.262666713 | 0.7354 |
| hCV30690780 | rs10737888 | hCV29795761 | rs7528450 | 0.51 | 0.262666713 | 0.3632 |
| hCV30690780 | rs10737888 | hCV29994467 | rs6694738 | 0.51 | 0.262666713 | 0.6653 |
| hCV30690780 | rs10737888 | hCV30012351 | rs10158245 | 0.51 | 0.262666713 | 0.2721 |
| hCV30690780 | rs10737888 | hCV30084348 | rs9287269 | 0.51 | 0.262666713 | 0.7625 |
| hCV30690780 | rs10737888 | hCV30372886 | rs9782883 | 0.51 | 0.262666713 | 0.763 |
| hCV30690780 | rs10737888 | hCV30382231 | rs9428966 | 0.51 | 0.262666713 | 0.687 |
| hCV30690780 | rs10737888 | hCV30690777 | rs12045585 | 0.51 | 0.262666713 | 0.4853 |
| hCV30690780 | rs10737888 | hCV30690778 | rs12140414 | 0.51 | 0.262666713 | 0.8652 |
| hCV30690780 | rs10737888 | hCV30690784 | rs4658574 | 0.51 | 0.262666713 | 0.4781 |
| hCV30690780 | rs10737888 | hCV31523552 | rs12739344 | 0.51 | 0.262666713 | 0.4405 |
| hCV30690780 | rs10737888 | hCV31523555 | rs12749316 | 0.51 | 0.262666713 | 0.3008 |
| hCV30690780 | rs10737888 | hCV31523557 | rs10754807 | 0.51 | 0.262666713 | 0.763 |
| hCV30690780 | rs10737888 | hCV31523563 | rs10927051 | 0.51 | 0.262666713 | 0.6787 |
| hCV30690780 | rs10737888 | hCV31523573 | rs11589907 | 0.51 | 0.262666713 | 0.2935 |
| hCV30690780 | rs10737888 | hCV31523576 | rs12691548 | 0.51 | 0.262666713 | 0.4257 |
| hCV30690780 | rs10737888 | hCV31523608 | rs12744297 | 0.51 | 0.262666713 | 0.3354 |
| hCV30690780 | rs10737888 | hCV31523624 | rs10927044 | 0.51 | 0.262666713 | 0.4405 |
| hCV30690780 | rs10737888 | hCV31523638 | rs12037013 | 0.51 | 0.262666713 | 0.6415 |
| hCV30690780 | rs10737888 | hCV31523639 | rs12034588 | 0.51 | 0.262666713 | 0.6809 |
| hCV30690780 | rs10737888 | hCV31523643 | rs6671475 | 0.51 | 0.262666713 | 0.7881 |
| hCV30690780 | rs10737888 | hCV31523650 | rs12048930 | 0.51 | 0.262666713 | 0.7354 |
| hCV30690780 | rs10737888 | hCV31523658 | rs12047209 | 0.51 | 0.262666713 | 0.4836 |
| hCV30690780 | rs10737888 | hCV31523688 | rs12049228 | 0.51 | 0.262666713 | 0.6692 |
| hCV30690780 | rs10737888 | hCV31523691 | rs12021907 | 0.51 | 0.262666713 | 0.6181 |
| hCV30690780 | rs10737888 | hCV31523707 | rs10803152 | 0.51 | 0.262666713 | 0.6415 |
| hCV30690780 | rs10737888 | hCV31523710 | rs10927059 | 0.51 | 0.262666713 | 0.763 |
| hCV30690780 | rs10737888 | hCV31523723 | rs12140040 | 0.51 | 0.262666713 | 0.4909 |
| hCV30690780 | rs10737888 | hCV31523736 | rs12124113 | 0.51 | 0.262666713 | 0.6181 |
| hCV30690780 | rs10737888 | hCV31523737 | rs12117580 | 0.51 | 0.262666713 | 0.3458 |
| hCV30690780 | rs10737888 | hCV31523740 | rs12032342 | 0.51 | 0.262666713 | 0.6818 |
| hCV30690780 | rs10737888 | hCV31523744 | rs12031994 | 0.51 | 0.262666713 | 0.6181 |
| hCV30690780 | rs10737888 | hCV804126 | rs320320 | 0.51 | 0.262666713 | 0.6818 |
| hCV30690780 | rs10737888 | hCV8688079 | rs884808 | 0.51 | 0.262666713 | 0.5066 |
| hCV30690780 | rs10737888 | hCV8688080 | rs884328 | 0.51 | 0.262666713 | 0.5066 |
| hCV30690780 | rs10737888 | hCV8688098 | rs1531244 | 0.51 | 0.262666713 | 0.4026 |
| hCV30690780 | rs10737888 | hCV8688111 | rs1578275 | 0.51 | 0.262666713 | 0.8627 |
| hCV30690780 | rs10737888 | hCV8688770 | rs3856231 | 0.51 | 0.262666713 | 0.4257 |
| hCV30690780 | rs10737888 | hCV8689016 | rs897959 | 0.51 | 0.262666713 | 0.4257 |
| hCV30690780 | rs10737888 | hCV9115290 | rs1352162 | 0.51 | 0.262666713 | 0.429 |
| hCV30690780 | rs10737888 | hCV9493073 | rs1058305 | 0.51 | 0.262666713 | 0.6914 |
| hCV30690780 | rs10737888 | hCV9493081 | rs1058304 | 0.51 | 0.262666713 | 0.6914 |
| hCV30690780 | rs10737888 | hCV97631 | rs1538773 | 0.51 | 0.262666713 | 1 |
| hCV30690780 | rs10737888 | hDV69368808 | rs12145558 | 0.51 | 0.262666713 | 0.4257 |
| hCV30690780 | rs10737888 | hDV71836703 | rs6429433 | 0.51 | 0.262666713 | 0.6326 |
| hCV30690780 | rs10737888 | hDV90784784 | rs320339 | 0.51 | 0.262666713 | 0.713 |
| hCV30710896 | rs3136520 | hCV31699700 | rs11039103 | 0.51 | 0.599559553 | 0.8293 |
| hCV30710896 | rs3136520 | hCV31699705 | rs11039099 | 0.51 | 0.599559553 | 1 |
| hCV30710896 | rs3136520 | hCV31699798 | rs11039049 | 0.51 | 0.599559553 | 1 |
| hCV30710896 | rs3136520 | hCV32292446 | rs3136524 | 0.51 | 0.599559553 | 1 |
| hCV30710896 | rs3136520 | hCV32368695 | rs7938933 | 0.51 | 0.599559553 | 0.6861 |
| hCV30747430 | rs11712211 | hCV11906384 | rs2472670 | 0.51 | 0.337199375 | 1 |
| hCV30747430 | rs11712211 | hCV11906385 | rs2472671 | 0.51 | 0.337199375 | 1 |
| hCV30747430 | rs11712211 | hCV11906386 | rs2056530 | 0.51 | 0.337199375 | 1 |
| hCV30747430 | rs11712211 | hCV16090105 | rs2873951 | 0.51 | 0.337199375 | 1 |
| hCV30747430 | rs11712211 | hCV26079834 | rs2472672 | 0.51 | 0.337199375 | 1 |
| hCV30747430 | rs11712211 | hCV27986929 | rs4688030 | 0.51 | 0.337199375 | 0.3388 |
| hCV30747430 | rs11712211 | hCV28031759 | rs4234666 | 0.51 | 0.337199375 | 1 |
| hCV30747430 | rs11712211 | hCV30526128 | rs9841230 | 0.51 | 0.337199375 | 0.3388 |
| hCV30747430 | rs11712211 | hCV30747431 | rs13071341 | 0.51 | 0.337199375 | 1 |
| hCV30747430 | rs11712211 | hCV8760915 | rs1403527 | 0.51 | 0.337199375 | 1 |
| hCV31523608 | rs12744297 | hCV12073160 | rs1973284 | 0.51 | 0.302208039 | 0.9556 |
| hCV31523608 | rs12744297 | hCV12073167 | rs2034915 | 0.51 | 0.302208039 | 0.9556 |
| hCV31523608 | rs12744297 | hCV12073172 | rs971285 | 0.51 | 0.302208039 | 0.9556 |
| hCV31523608 | rs12744297 | hCV12073180 | rs1870272 | 0.51 | 0.302208039 | 0.9599 |
| hCV31523608 | rs12744297 | hCV15755277 | rs3008657 | 0.51 | 0.302208039 | 0.6842 |
| hCV31523608 | rs12744297 | hCV15760229 | rs3006939 | 0.51 | 0.302208039 | 0.3354 |
| hCV31523608 | rs12744297 | hCV15760280 | rs3006940 | 0.51 | 0.302208039 | 0.3354 |
| hCV31523608 | rs12744297 | hCV15776869 | rs2345994 | 0.51 | 0.302208039 | 0.9118 |
| hCV31523608 | rs12744297 | hCV15823016 | rs2125229 | 0.51 | 0.302208039 | 0.3716 |
| hCV31523608 | rs12744297 | hCV15823024 | rs2125230 | 0.51 | 0.302208039 | 0.4338 |
| hCV31523608 | rs12744297 | hCV15823033 | rs2125231 | 0.51 | 0.302208039 | 0.9556 |
| hCV31523608 | rs12744297 | hCV15885425 | rs2290754 | 0.51 | 0.302208039 | 0.4338 |
| hCV31523608 | rs12744297 | hCV15885435 | rs2290753 | 0.51 | 0.302208039 | 0.9556 |
| hCV31523608 | rs12744297 | hCV15953062 | rs2953330 | 0.51 | 0.302208039 | 0.5697 |
| hCV31523608 | rs12744297 | hCV15953063 | rs2953331 | 0.51 | 0.302208039 | 0.717 |
| hCV31523608 | rs12744297 | hCV15953071 | rs2953329 | 0.51 | 0.302208039 | 0.4589 |
| hCV31523608 | rs12744297 | hCV15965328 | rs2291409 | 0.51 | 0.302208039 | 1 |
| hCV31523608 | rs12744297 | hCV15965338 | rs2291410 | 0.51 | 0.302208039 | 0.3872 |
| hCV31523608 | rs12744297 | hCV16082410 | rs2881275 | 0.51 | 0.302208039 | 0.4269 |
| hCV31523608 | rs12744297 | hCV16082411 | rs2881274 | 0.51 | 0.302208039 | 0.3716 |
| hCV31523608 | rs12744297 | hCV1678656 | rs1458024 | 0.51 | 0.302208039 | 0.4269 |
| hCV31523608 | rs12744297 | hCV1678658 | rs897960 | 0.51 | 0.302208039 | 0.3716 |
| hCV31523608 | rs12744297 | hCV1678668 | rs1379700 | 0.51 | 0.302208039 | 0.829 |
| hCV31523608 | rs12744297 | hCV1678674 | rs1458023 | 0.51 | 0.302208039 | 0.4338 |
| hCV31523608 | rs12744297 | hCV1678683 | rs1486475 | 0.51 | 0.302208039 | 0.829 |
| hCV31523608 | rs12744297 | hCV1678687 | rs320305 | 0.51 | 0.302208039 | 0.3415 |
| hCV31523608 | rs12744297 | hCV1678723 | rs1486472 | 0.51 | 0.302208039 | 0.7959 |
| hCV31523608 | rs12744297 | hCV26034158 | rs4515770 | 0.51 | 0.302208039 | 0.3354 |
| hCV31523608 | rs12744297 | hCV26719082 | rs10927046 | 0.51 | 0.302208039 | 0.3415 |
| hCV31523608 | rs12744297 | hCV26719085 | rs10927047 | 0.51 | 0.302208039 | 0.3716 |
| hCV31523608 | rs12744297 | hCV26719086 | rs4658585 | 0.51 | 0.302208039 | 0.9119 |
| hCV31523608 | rs12744297 | hCV26719087 | rs4658401 | 0.51 | 0.302208039 | 0.9056 |
| hCV31523608 | rs12744297 | hCV26719102 | rs10927056 | 0.51 | 0.302208039 | 0.8824 |
| hCV31523608 | rs12744297 | hCV26719107 | rs7538011 | 0.51 | 0.302208039 | 0.4024 |
| hCV31523608 | rs12744297 | hCV26719108 | rs10927035 | 0.51 | 0.302208039 | 0.8066 |
| hCV31523608 | rs12744297 | hCV26719113 | rs7517340 | 0.51 | 0.302208039 | 0.3842 |
| hCV31523608 | rs12744297 | hCV26719114 | rs7549780 | 0.51 | 0.302208039 | 0.9556 |
| hCV31523608 | rs12744297 | hCV26719116 | rs10927039 | 0.51 | 0.302208039 | 0.3861 |
| hCV31523608 | rs12744297 | hCV26719117 | rs12144559 | 0.51 | 0.302208039 | 0.9556 |
| hCV31523608 | rs12744297 | hCV26719120 | rs10927040 | 0.51 | 0.302208039 | 0.4658 |
| hCV31523608 | rs12744297 | hCV26719121 | rs10927041 | 0.51 | 0.302208039 | 0.4658 |
| hCV31523608 | rs12744297 | hCV26719137 | rs12136847 | 0.51 | 0.302208039 | 0.9556 |
| hCV31523608 | rs12744297 | hCV26719140 | rs320323 | 0.51 | 0.302208039 | 0.3716 |
| hCV31523608 | rs12744297 | hCV26719149 | rs6675851 | 0.51 | 0.302208039 | 0.4338 |
| hCV31523608 | rs12744297 | hCV26719161 | rs6682456 | 0.51 | 0.302208039 | 0.3716 |
| hCV31523608 | rs12744297 | hCV26719162 | rs4132509 | 0.51 | 0.302208039 | 0.4338 |
| hCV31523608 | rs12744297 | hCV26719163 | rs6429435 | 0.51 | 0.302208039 | 0.9556 |
| hCV31523608 | rs12744297 | hCV26719171 | rs10927075 | 0.51 | 0.302208039 | 0.9556 |
| hCV31523608 | rs12744297 | hCV26719176 | rs10927076 | 0.51 | 0.302208039 | 0.4338 |
| hCV31523608 | rs12744297 | hCV26719179 | rs6672195 | 0.51 | 0.302208039 | 0.9556 |
| hCV31523608 | rs12744297 | hCV26719184 | rs4658593 | 0.51 | 0.302208039 | 0.3334 |
| hCV31523608 | rs12744297 | hCV26719192 | rs10803161 | 0.51 | 0.302208039 | 0.4124 |
| hCV31523608 | rs12744297 | hCV26719193 | rs6429439 | 0.51 | 0.302208039 | 0.372 |
| hCV31523608 | rs12744297 | hCV26719194 | rs10927081 | 0.51 | 0.302208039 | 0.9556 |
| hCV31523608 | rs12744297 | hCV26719197 | rs4590656 | 0.51 | 0.302208039 | 0.9556 |
| hCV31523608 | rs12744297 | hCV26719202 | rs4658588 | 0.51 | 0.302208039 | 0.9556 |
| hCV31523608 | rs12744297 | hCV26719215 | rs12144546 | 0.51 | 0.302208039 | 0.9556 |
| hCV31523608 | rs12744297 | hCV26719217 | rs7548254 | 0.51 | 0.302208039 | 0.9556 |
| hCV31523608 | rs12744297 | hCV26719218 | rs4658403 | 0.51 | 0.302208039 | 0.4141 |
| hCV31523608 | rs12744297 | hCV26719219 | rs9782958 | 0.51 | 0.302208039 | 0.3872 |
| hCV31523608 | rs12744297 | hCV26719222 | rs4553169 | 0.51 | 0.302208039 | 0.4338 |
| hCV31523608 | rs12744297 | hCV26719225 | rs11586029 | 0.51 | 0.302208039 | 0.9556 |
| hCV31523608 | rs12744297 | hCV26719227 | rs10927065 | 0.51 | 0.302208039 | 0.3415 |
| hCV31523608 | rs12744297 | hCV26719232 | rs10803158 | 0.51 | 0.302208039 | 0.4338 |
| hCV31523608 | rs12744297 | hCV26719233 | rs10927067 | 0.51 | 0.302208039 | 0.4338 |
| hCV31523608 | rs12744297 | hCV27170898 | rs12753750 | 0.51 | 0.302208039 | 0.717 |
| hCV31523608 | rs12744297 | hCV27171311 | rs4322213 | 0.51 | 0.302208039 | 0.3716 |
| hCV31523608 | rs12744297 | hCV27171350 | rs4430311 | 0.51 | 0.302208039 | 0.6842 |
| hCV31523608 | rs12744297 | hCV27498250 | rs3766673 | 0.51 | 0.302208039 | 0.4658 |
| hCV31523608 | rs12744297 | hCV27511819 | rs3753549 | 0.51 | 0.302208039 | 0.3716 |
| hCV31523608 | rs12744297 | hCV29210363 | rs6656918 | 0.51 | 0.302208039 | 0.3354 |
| hCV31523608 | rs12744297 | hCV29210367 | rs4518884 | 0.51 | 0.302208039 | 0.9599 |
| hCV31523608 | rs12744297 | hCV29210368 | rs4313380 | 0.51 | 0.302208039 | 0.3279 |
| hCV31523608 | rs12744297 | hCV29210370 | rs6676779 | 0.51 | 0.302208039 | 0.3716 |
| hCV31523608 | rs12744297 | hCV29542869 | rs7534117 | 0.51 | 0.302208039 | 0.4338 |
| hCV31523608 | rs12744297 | hCV29560960 | rs7519673 | 0.51 | 0.302208039 | 0.3415 |
| hCV31523608 | rs12744297 | hCV29633221 | rs10157763 | 0.51 | 0.302208039 | 0.9589 |
| hCV31523608 | rs12744297 | hCV29669242 | rs7547861 | 0.51 | 0.302208039 | 0.3716 |
| hCV31523608 | rs12744297 | hCV29723686 | rs7512207 | 0.51 | 0.302208039 | 0.4007 |
| hCV31523608 | rs12744297 | hCV29741723 | rs7517921 | 0.51 | 0.302208039 | 0.3872 |
| hCV31523608 | rs12744297 | hCV29795761 | rs7528450 | 0.51 | 0.302208039 | 1 |
| hCV31523608 | rs12744297 | hCV29831992 | rs7523198 | 0.51 | 0.302208039 | 0.3716 |
| hCV31523608 | rs12744297 | hCV29859556 | rs6704286 | 0.51 | 0.302208039 | 0.3716 |
| hCV31523608 | rs12744297 | hCV29958244 | rs4614244 | 0.51 | 0.302208039 | 0.312 |
| hCV31523608 | rs12744297 | hCV29994467 | rs6694738 | 0.51 | 0.302208039 | 0.4024 |
| hCV31523608 | rs12744297 | hCV30012351 | rs10158245 | 0.51 | 0.302208039 | 0.9568 |
| hCV31523608 | rs12744297 | hCV30048213 | rs7552982 | 0.51 | 0.302208039 | 0.3716 |
| hCV31523608 | rs12744297 | hCV30048215 | rs6703013 | 0.51 | 0.302208039 | 0.3716 |
| hCV31523608 | rs12744297 | hCV30084348 | rs9287269 | 0.51 | 0.302208039 | 0.432 |
| hCV31523608 | rs12744297 | hCV30210344 | rs9428970 | 0.51 | 0.302208039 | 0.3716 |
| hCV31523608 | rs12744297 | hCV30228080 | rs4593807 | 0.51 | 0.302208039 | 0.3842 |
| hCV31523608 | rs12744297 | hCV30264437 | rs7514510 | 0.51 | 0.302208039 | 0.3716 |
| hCV31523608 | rs12744297 | hCV30354518 | rs7517732 | 0.51 | 0.302208039 | 0.3399 |
| hCV31523608 | rs12744297 | hCV30372886 | rs9782883 | 0.51 | 0.302208039 | 0.4338 |
| hCV31523608 | rs12744297 | hCV30390695 | rs7553458 | 0.51 | 0.302208039 | 0.3992 |
| hCV31523608 | rs12744297 | hCV30462455 | rs6686591 | 0.51 | 0.302208039 | 0.3716 |
| hCV31523608 | rs12744297 | hCV30606791 | rs6688135 | 0.51 | 0.302208039 | 0.3716 |
| hCV31523608 | rs12744297 | hCV30690780 | rs10737888 | 0.51 | 0.302208039 | 0.3354 |
| hCV31523608 | rs12744297 | hCV31523552 | rs12739344 | 0.51 | 0.302208039 | 1 |
| hCV31523608 | rs12744297 | hCV31523555 | rs12749316 | 0.51 | 0.302208039 | 0.9202 |
| hCV31523608 | rs12744297 | hCV31523557 | rs10754807 | 0.51 | 0.302208039 | 0.4338 |
| hCV31523608 | rs12744297 | hCV31523563 | rs10927051 | 0.51 | 0.302208039 | 0.4005 |
| hCV31523608 | rs12744297 | hCV31523573 | rs11589907 | 0.51 | 0.302208039 | 0.9599 |
| hCV31523608 | rs12744297 | hCV31523576 | rs12691548 | 0.51 | 0.302208039 | 0.9556 |
| hCV31523608 | rs12744297 | hCV31523624 | rs10927044 | 0.51 | 0.302208039 | 1 |
| hCV31523608 | rs12744297 | hCV31523638 | rs12037013 | 0.51 | 0.302208039 | 0.3716 |
| hCV31523608 | rs12744297 | hCV31523639 | rs12034588 | 0.51 | 0.302208039 | 0.4302 |
| hCV31523608 | rs12744297 | hCV31523643 | rs6671475 | 0.51 | 0.302208039 | 0.4658 |
| hCV31523608 | rs12744297 | hCV31523650 | rs12048930 | 0.51 | 0.302208039 | 0.3872 |
| hCV31523608 | rs12744297 | hCV31523658 | rs12047209 | 0.51 | 0.302208039 | 0.3058 |
| hCV31523608 | rs12744297 | hCV31523659 | rs10733129 | 0.51 | 0.302208039 | 0.312 |
| hCV31523608 | rs12744297 | hCV31523680 | rs4484910 | 0.51 | 0.302208039 | 0.3716 |
| hCV31523608 | rs12744297 | hCV31523688 | rs12049228 | 0.51 | 0.302208039 | 0.4319 |
| hCV31523608 | rs12744297 | hCV31523691 | rs12021907 | 0.51 | 0.302208039 | 0.3415 |
| hCV31523608 | rs12744297 | hCV31523692 | rs10927082 | 0.51 | 0.302208039 | 0.3582 |
| hCV31523608 | rs12744297 | hCV31523707 | rs10803152 | 0.51 | 0.302208039 | 0.3716 |
| hCV31523608 | rs12744297 | hCV31523710 | rs10927059 | 0.51 | 0.302208039 | 0.4338 |
| hCV31523608 | rs12744297 | hCV31523723 | rs12140040 | 0.51 | 0.302208039 | 0.3192 |
| hCV31523608 | rs12744297 | hCV31523725 | rs10927060 | 0.51 | 0.302208039 | 0.9599 |
| hCV31523608 | rs12744297 | hCV31523731 | rs10803155 | 0.51 | 0.302208039 | 0.3716 |
| hCV31523608 | rs12744297 | hCV31523736 | rs12124113 | 0.51 | 0.302208039 | 0.3415 |
| hCV31523608 | rs12744297 | hCV31523737 | rs12117580 | 0.51 | 0.302208039 | 0.8702 |
| hCV31523608 | rs12744297 | hCV31523740 | rs12032342 | 0.51 | 0.302208039 | 0.4269 |
| hCV31523608 | rs12744297 | hCV31523744 | rs12031994 | 0.51 | 0.302208039 | 0.3415 |
| hCV31523608 | rs12744297 | hCV804118 | rs320342 | 0.51 | 0.302208039 | 0.3279 |
| hCV31523608 | rs12744297 | hCV804120 | rs320344 | 0.51 | 0.302208039 | 0.3716 |
| hCV31523608 | rs12744297 | hCV804121 | rs320345 | 0.51 | 0.302208039 | 0.3716 |
| hCV31523608 | rs12744297 | hCV804126 | rs320320 | 0.51 | 0.302208039 | 0.4269 |
| hCV31523608 | rs12744297 | hCV804128 | rs167661 | 0.51 | 0.302208039 | 0.372 |
| hCV31523608 | rs12744297 | hCV804132 | rs406323 | 0.51 | 0.302208039 | 0.3716 |
| hCV31523608 | rs12744297 | hCV804139 | rs320302 | 0.51 | 0.302208039 | 0.3716 |
| hCV31523608 | rs12744297 | hCV804146 | rs320308 | 0.51 | 0.302208039 | 0.312 |
| hCV31523608 | rs12744297 | hCV804147 | rs320309 | 0.51 | 0.302208039 | 0.3716 |
| hCV31523608 | rs12744297 | hCV804156 | rs320316 | 0.51 | 0.302208039 | 0.3716 |
| hCV31523608 | rs12744297 | hCV804160 | rs320331 | 0.51 | 0.302208039 | 0.3324 |
| hCV31523608 | rs12744297 | hCV804166 | rs320334 | 0.51 | 0.302208039 | 0.372 |
| hCV31523608 | rs12744297 | hCV8688098 | rs1531244 | 0.51 | 0.302208039 | 0.9556 |
| hCV31523608 | rs12744297 | hCV8688110 | rs946824 | 0.51 | 0.302208039 | 0.3716 |
| hCV31523608 | rs12744297 | hCV8688770 | rs3856231 | 0.51 | 0.302208039 | 0.9556 |
| hCV31523608 | rs12744297 | hCV8688837 | rs320318 | 0.51 | 0.302208039 | 0.3716 |
| hCV31523608 | rs12744297 | hCV8688866 | rs1531243 | 0.51 | 0.302208039 | 0.3716 |
| hCV31523608 | rs12744297 | hCV8689005 | rs1458022 | 0.51 | 0.302208039 | 0.3716 |
| hCV31523608 | rs12744297 | hCV8689016 | rs897959 | 0.51 | 0.302208039 | 0.9556 |
| hCV31523608 | rs12744297 | hCV8689017 | rs1458021 | 0.51 | 0.302208039 | 0.3716 |
| hCV31523608 | rs12744297 | hCV8689027 | rs1545654 | 0.51 | 0.302208039 | 0.3716 |
| hCV31523608 | rs12744297 | hCV9115290 | rs1352162 | 0.51 | 0.302208039 | 0.9555 |
| hCV31523608 | rs12744297 | hCV97631 | rs1538773 | 0.51 | 0.302208039 | 0.3354 |
| hCV31523608 | rs12744297 | hDV69368808 | rs12145558 | 0.51 | 0.302208039 | 0.9556 |
| hCV31523608 | rs12744297 | hDV71836703 | rs6429433 | 0.51 | 0.302208039 | 0.3315 |
| hCV31523608 | rs12744297 | hDV90784784 | rs320339 | 0.51 | 0.302208039 | 0.3699 |
| hCV31523650 | rs12048930 | hCV12073160 | rs1973284 | 0.51 | 0.430712711 | 0.5233 |
| hCV31523650 | rs12048930 | hCV12073167 | rs2034915 | 0.51 | 0.430712711 | 0.5107 |
| hCV31523650 | rs12048930 | hCV12073172 | rs971285 | 0.51 | 0.430712711 | 0.5119 |
| hCV31523650 | rs12048930 | hCV15760229 | rs3006939 | 0.51 | 0.430712711 | 0.7354 |
| hCV31523650 | rs12048930 | hCV15760238 | rs3006936 | 0.51 | 0.430712711 | 0.6267 |
| hCV31523650 | rs12048930 | hCV15760280 | rs3006940 | 0.51 | 0.430712711 | 0.7354 |
| hCV31523650 | rs12048930 | hCV15776869 | rs2345994 | 0.51 | 0.430712711 | 0.4998 |
| hCV31523650 | rs12048930 | hCV15823024 | rs2125230 | 0.51 | 0.430712711 | 0.9681 |
| hCV31523650 | rs12048930 | hCV15823033 | rs2125231 | 0.51 | 0.430712711 | 0.5119 |
| hCV31523650 | rs12048930 | hCV15885425 | rs2290754 | 0.51 | 0.430712711 | 0.9681 |
| hCV31523650 | rs12048930 | hCV15885435 | rs2290753 | 0.51 | 0.430712711 | 0.5119 |
| hCV31523650 | rs12048930 | hCV15965328 | rs2291409 | 0.51 | 0.430712711 | 0.4977 |
| hCV31523650 | rs12048930 | hCV15965338 | rs2291410 | 0.51 | 0.430712711 | 0.9368 |
| hCV31523650 | rs12048930 | hCV16082410 | rs2881275 | 0.51 | 0.430712711 | 0.9314 |
| hCV31523650 | rs12048930 | hCV1678656 | rs1458024 | 0.51 | 0.430712711 | 0.9314 |
| hCV31523650 | rs12048930 | hCV1678674 | rs1458023 | 0.51 | 0.430712711 | 0.9658 |
| hCV31523650 | rs12048930 | hCV1678687 | rs320305 | 0.51 | 0.430712711 | 0.7842 |
| hCV31523650 | rs12048930 | hCV26034158 | rs4515770 | 0.51 | 0.430712711 | 0.7354 |
| hCV31523650 | rs12048930 | hCV26719082 | rs10927046 | 0.51 | 0.430712711 | 0.7744 |
| hCV31523650 | rs12048930 | hCV26719085 | rs10927047 | 0.51 | 0.430712711 | 0.8098 |
| hCV31523650 | rs12048930 | hCV26719086 | rs4658585 | 0.51 | 0.430712711 | 0.4932 |
| hCV31523650 | rs12048930 | hCV26719107 | rs7538011 | 0.51 | 0.430712711 | 0.7825 |
| hCV31523650 | rs12048930 | hCV26719113 | rs7517340 | 0.51 | 0.430712711 | 0.8564 |
| hCV31523650 | rs12048930 | hCV26719114 | rs7549780 | 0.51 | 0.430712711 | 0.5119 |
| hCV31523650 | rs12048930 | hCV26719116 | rs10927039 | 0.51 | 0.430712711 | 0.7976 |
| hCV31523650 | rs12048930 | hCV26719117 | rs12144559 | 0.51 | 0.430712711 | 0.5119 |
| hCV31523650 | rs12048930 | hCV26719120 | rs10927040 | 0.51 | 0.430712711 | 0.9368 |
| hCV31523650 | rs12048930 | hCV26719121 | rs10927041 | 0.51 | 0.430712711 | 0.9368 |
| hCV31523650 | rs12048930 | hCV26719137 | rs12136847 | 0.51 | 0.430712711 | 0.5119 |
| hCV31523650 | rs12048930 | hCV26719149 | rs6675851 | 0.51 | 0.430712711 | 0.9681 |
| hCV31523650 | rs12048930 | hCV26719162 | rs4132509 | 0.51 | 0.430712711 | 0.9681 |
| hCV31523650 | rs12048930 | hCV26719163 | rs6429435 | 0.51 | 0.430712711 | 0.5119 |
| hCV31523650 | rs12048930 | hCV26719171 | rs10927075 | 0.51 | 0.430712711 | 0.4932 |
| hCV31523650 | rs12048930 | hCV26719176 | rs10927076 | 0.51 | 0.430712711 | 0.9681 |
| hCV31523650 | rs12048930 | hCV26719179 | rs6672195 | 0.51 | 0.430712711 | 0.5119 |
| hCV31523650 | rs12048930 | hCV26719192 | rs10803161 | 0.51 | 0.430712711 | 0.9274 |
| hCV31523650 | rs12048930 | hCV26719194 | rs10927081 | 0.51 | 0.430712711 | 0.5119 |
| hCV31523650 | rs12048930 | hCV26719197 | rs4590656 | 0.51 | 0.430712711 | 0.5119 |
| hCV31523650 | rs12048930 | hCV26719201 | rs4478795 | 0.51 | 0.430712711 | 0.7041 |
| hCV31523650 | rs12048930 | hCV26719202 | rs4658588 | 0.51 | 0.430712711 | 0.5107 |
| hCV31523650 | rs12048930 | hCV26719215 | rs12144546 | 0.51 | 0.430712711 | 0.5119 |
| hCV31523650 | rs12048930 | hCV26719217 | rs7548254 | 0.51 | 0.430712711 | 0.5119 |
| hCV31523650 | rs12048930 | hCV26719219 | rs9782958 | 0.51 | 0.430712711 | 0.9337 |
| hCV31523650 | rs12048930 | hCV26719222 | rs4553169 | 0.51 | 0.430712711 | 0.9681 |
| hCV31523650 | rs12048930 | hCV26719225 | rs11586029 | 0.51 | 0.430712711 | 0.5119 |
| hCV31523650 | rs12048930 | hCV26719227 | rs10927065 | 0.51 | 0.430712711 | 0.7793 |
| hCV31523650 | rs12048930 | hCV26719232 | rs10803158 | 0.51 | 0.430712711 | 0.9674 |
| hCV31523650 | rs12048930 | hCV26719233 | rs10927067 | 0.51 | 0.430712711 | 0.9681 |
| hCV31523650 | rs12048930 | hCV27170898 | rs12753750 | 0.51 | 0.430712711 | 0.4449 |
| hCV31523650 | rs12048930 | hCV27171350 | rs4430311 | 0.51 | 0.430712711 | 0.4349 |
| hCV31523650 | rs12048930 | hCV27498250 | rs3766673 | 0.51 | 0.430712711 | 0.9071 |
| hCV31523650 | rs12048930 | hCV29210363 | rs6656918 | 0.51 | 0.430712711 | 0.7354 |
| hCV31523650 | rs12048930 | hCV29542869 | rs7534117 | 0.51 | 0.430712711 | 0.9674 |
| hCV31523650 | rs12048930 | hCV29560960 | rs7519673 | 0.51 | 0.430712711 | 0.7842 |
| hCV31523650 | rs12048930 | hCV29741723 | rs7517921 | 0.51 | 0.430712711 | 0.9368 |
| hCV31523650 | rs12048930 | hCV29994467 | rs6694738 | 0.51 | 0.430712711 | 0.7825 |
| hCV31523650 | rs12048930 | hCV30084348 | rs9287269 | 0.51 | 0.430712711 | 0.9681 |
| hCV31523650 | rs12048930 | hCV30372886 | rs9782883 | 0.51 | 0.430712711 | 0.9681 |
| hCV31523650 | rs12048930 | hCV30382231 | rs9428966 | 0.51 | 0.430712711 | 0.489 |
| hCV31523650 | rs12048930 | hCV30690778 | rs12140414 | 0.51 | 0.430712711 | 0.5857 |
| hCV31523650 | rs12048930 | hCV30690780 | rs10737888 | 0.51 | 0.430712711 | 0.7354 |
| hCV31523650 | rs12048930 | hCV31523552 | rs12739344 | 0.51 | 0.430712711 | 0.4932 |
| hCV31523650 | rs12048930 | hCV31523557 | rs10754807 | 0.51 | 0.430712711 | 0.9681 |
| hCV31523650 | rs12048930 | hCV31523563 | rs10927051 | 0.51 | 0.430712711 | 1 |
| hCV31523650 | rs12048930 | hCV31523576 | rs12691548 | 0.51 | 0.430712711 | 0.5119 |
| hCV31523650 | rs12048930 | hCV31523624 | rs10927044 | 0.51 | 0.430712711 | 0.4932 |
| hCV31523650 | rs12048930 | hCV31523638 | rs12037013 | 0.51 | 0.430712711 | 0.814 |
| hCV31523650 | rs12048930 | hCV31523639 | rs12034588 | 0.51 | 0.430712711 | 0.9312 |
| hCV31523650 | rs12048930 | hCV31523643 | rs6671475 | 0.51 | 0.430712711 | 0.9368 |
| hCV31523650 | rs12048930 | hCV31523658 | rs12047209 | 0.51 | 0.430712711 | 0.6687 |
| hCV31523650 | rs12048930 | hCV31523688 | rs12049228 | 0.51 | 0.430712711 | 0.9276 |
| hCV31523650 | rs12048930 | hCV31523691 | rs12021907 | 0.51 | 0.430712711 | 0.7842 |
| hCV31523650 | rs12048930 | hCV31523707 | rs10803152 | 0.51 | 0.430712711 | 0.814 |
| hCV31523650 | rs12048930 | hCV31523710 | rs10927059 | 0.51 | 0.430712711 | 0.9681 |
| hCV31523650 | rs12048930 | hCV31523723 | rs12140040 | 0.51 | 0.430712711 | 0.6706 |
| hCV31523650 | rs12048930 | hCV31523736 | rs12124113 | 0.51 | 0.430712711 | 0.7842 |
| hCV31523650 | rs12048930 | hCV31523740 | rs12032342 | 0.51 | 0.430712711 | 0.9314 |
| hCV31523650 | rs12048930 | hCV31523744 | rs12031994 | 0.51 | 0.430712711 | 0.7842 |
| hCV31523650 | rs12048930 | hCV804126 | rs320320 | 0.51 | 0.430712711 | 0.9314 |
| hCV31523650 | rs12048930 | hCV8688098 | rs1531244 | 0.51 | 0.430712711 | 0.4837 |
| hCV31523650 | rs12048930 | hCV8688111 | rs1578275 | 0.51 | 0.430712711 | 0.5771 |
| hCV31523650 | rs12048930 | hCV8688770 | rs3856231 | 0.51 | 0.430712711 | 0.5119 |
| hCV31523650 | rs12048930 | hCV8689016 | rs897959 | 0.51 | 0.430712711 | 0.5119 |
| hCV31523650 | rs12048930 | hCV9115290 | rs1352162 | 0.51 | 0.430712711 | 0.484 |
| hCV31523650 | rs12048930 | hCV9493073 | rs1058305 | 0.51 | 0.430712711 | 0.4963 |
| hCV31523650 | rs12048930 | hCV9493081 | rs1058304 | 0.51 | 0.430712711 | 0.4963 |
| hCV31523650 | rs12048930 | hCV97631 | rs1538773 | 0.51 | 0.430712711 | 0.7354 |
| hCV31523650 | rs12048930 | hDV69368808 | rs12145558 | 0.51 | 0.430712711 | 0.5119 |
| hCV31523650 | rs12048930 | hDV71836703 | rs6429433 | 0.51 | 0.430712711 | 0.7322 |
| hCV31523650 | rs12048930 | hDV90784784 | rs320339 | 0.51 | 0.430712711 | 0.9053 |
| hCV32291301 | rs4253302 | hCV15968025 | rs2292425 | 0.51 | 0.239176625 | 0.382 |
| hCV32291301 | rs4253302 | hCV15968026 | rs2292426 | 0.51 | 0.239176625 | 0.4222 |
| hCV32291301 | rs4253302 | hCV15968034 | rs2292428 | 0.51 | 0.239176625 | 0.3408 |
| hCV32291301 | rs4253302 | hCV15975109 | rs2304596 | 0.51 | 0.239176625 | 1 |
| hCV32291301 | rs4253302 | hCV22272267 | rs3733402 | 0.51 | 0.239176625 | 0.2397 |
| hCV32291301 | rs4253302 | hCV25989001 | hCV25989001 | 0.51 | 0.239176625 | 0.9447 |
| hCV32291301 | rs4253302 | hCV25990131 | rs13146272 | 0.51 | 0.239176625 | 0.3944 |
| hCV32291301 | rs4253302 | hCV27482765 | rs3775301 | 0.51 | 0.239176625 | 1 |
| hCV32291301 | rs4253302 | hCV27902808 | rs4253236 | 0.51 | 0.239176625 | 0.3677 |
| hCV32291301 | rs4253302 | hCV28960679 | rs6844764 | 0.51 | 0.239176625 | 0.2663 |
| hCV32291301 | rs4253302 | hCV29053265 | rs4253244 | 0.51 | 0.239176625 | 0.3178 |
| hCV32291301 | rs4253302 | hCV29718000 | rs4253238 | 0.51 | 0.239176625 | 0.2447 |
| hCV32291301 | rs4253302 | hCV32291217 | rs4253323 | 0.51 | 0.239176625 | 1 |
| hCV32291301 | rs4253302 | hCV32291286 | rs4253422 | 0.51 | 0.239176625 | 0.3885 |
| hCV32291301 | rs4253302 | hCV32291287 | rs4253423 | 0.51 | 0.239176625 | 0.3885 |
| hCV32291301 | rs4253302 | hCV32291295 | rs4253292 | 0.51 | 0.239176625 | 1 |
| hCV32291301 | rs4253302 | hCV32295028 | rs4253260 | 0.51 | 0.239176625 | 1 |
| hCV32291301 | rs4253302 | hCV3229991 | rs4241815 | 0.51 | 0.239176625 | 0.2397 |
| hCV32291301 | rs4253302 | hCV3229992 | rs3775298 | 0.51 | 0.239176625 | 0.2397 |
| hCV32291301 | rs4253302 | hCV3229995 | rs11132382 | 0.51 | 0.239176625 | 0.2447 |
| hCV32291301 | rs4253302 | hCV3230007 | rs4253311 | 0.51 | 0.239176625 | 0.2397 |
| hCV32291301 | rs4253302 | hCV3230031 | rs4253419 | 0.51 | 0.239176625 | 0.3885 |
| hCV32291301 | rs4253302 | hCV3230097 | rs3736455 | 0.51 | 0.239176625 | 0.4296 |
| hCV32291301 | rs4253302 | hCV3230101 | rs6835839 | 0.51 | 0.239176625 | 0.327 |
| hCV32291301 | rs4253302 | hCV3230106 | rs1473597 | 0.51 | 0.239176625 | 0.3407 |
| hCV32291301 | rs4253302 | hCV3230110 | rs2276917 | 0.51 | 0.239176625 | 0.3408 |
| hCV32291301 | rs4253302 | hCV3230118 | rs4253429 | 0.51 | 0.239176625 | 0.3885 |
| hCV32291301 | rs4253302 | hCV3230125 | rs11938564 | 0.51 | 0.239176625 | 0.2776 |
| hCV32291301 | rs4253302 | hCV32313006 | rs4253248 | 0.51 | 0.239176625 | 0.2447 |
| hCV32291301 | rs4253302 | hCV32313024 | rs4253239 | 0.51 | 0.239176625 | 1 |
| hCV32291301 | rs4253302 | hCV32358984 | rs4253256 | 0.51 | 0.239176625 | 0.3641 |
| hCV32291301 | rs4253302 | hDV71222711 | rs4253252 | 0.51 | 0.239176625 | 0.2447 |
| hCV3230038 | rs2289252 | hCV11786147 | rs4862662 | 0.51 | 0.044201827 | 0.1313 |
| hCV3230038 | rs2289252 | hCV11786235 | rs4253287 | 0.51 | 0.044201827 | 0.106 |
| hCV3230038 | rs2289252 | hCV11786258 | rs4253303 | 0.51 | 0.044201827 | 0.1956 |
| hCV3230038 | rs2289252 | hCV11786259 | rs4253304 | 0.51 | 0.044201827 | 0.2636 |
| hCV3230038 | rs2289252 | hCV11786295 | rs4253421 | 0.51 | 0.044201827 | 0.075 |
| hCV3230038 | rs2289252 | hCV11786301 | rs5970 | 0.51 | 0.044201827 | 0.0938 |
| hCV3230038 | rs2289252 | hCV11786307 | rs1062547 | 0.51 | 0.044201827 | 0.3739 |
| hCV3230038 | rs2289252 | hCV11786311 | rs13145616 | 0.51 | 0.044201827 | 0.1125 |
| hCV3230038 | rs2289252 | hCV11786327 | rs13133050 | 0.51 | 0.044201827 | 0.1784 |
| hCV3230038 | rs2289252 | hCV12066116 | rs1877320 | 0.51 | 0.044201827 | 0.0748 |
| hCV3230038 | rs2289252 | hCV12066118 | rs2048 | 0.51 | 0.044201827 | 0.1136 |
| hCV3230038 | rs2289252 | hCV12066119 | rs1912826 | 0.51 | 0.044201827 | 0.1027 |
| hCV3230038 | rs2289252 | hCV12066124 | rs2036914 | 0.51 | 0.044201827 | 0.3834 |
| hCV3230038 | rs2289252 | hCV12066129 | rs1593 | 0.51 | 0.044201827 | 0.0795 |
| hCV3230038 | rs2289252 | hCV1333083 | rs10022988 | 0.51 | 0.044201827 | 0.0488 |
| hCV3230038 | rs2289252 | hCV1333090 | rs6816112 | 0.51 | 0.044201827 | 0.0764 |
| hCV3230038 | rs2289252 | hCV1333097 | rs4862680 | 0.51 | 0.044201827 | 0.0488 |
| hCV3230038 | rs2289252 | hCV1333099 | rs10020635 | 0.51 | 0.044201827 | 0.0659 |
| hCV3230038 | rs2289252 | hCV15793897 | rs3087505 | 0.51 | 0.044201827 | 0.0486 |
| hCV3230038 | rs2289252 | hCV15811716 | rs2102575 | 0.51 | 0.044201827 | 0.0448 |
| hCV3230038 | rs2289252 | hCV15968025 | rs2292425 | 0.51 | 0.044201827 | 0.0893 |
| hCV3230038 | rs2289252 | hCV15968026 | rs2292426 | 0.51 | 0.044201827 | 0.181 |
| hCV3230038 | rs2289252 | hCV15968034 | rs2292428 | 0.51 | 0.044201827 | 0.0718 |
| hCV3230038 | rs2289252 | hCV15968043 | rs2292423 | 0.51 | 0.044201827 | 0.2462 |
| hCV3230038 | rs2289252 | hCV16172925 | rs2241818 | 0.51 | 0.044201827 | 0.1263 |
| hCV3230038 | rs2289252 | hCV16172935 | rs2241817 | 0.51 | 0.044201827 | 0.3937 |
| hCV3230038 | rs2289252 | hCV194962 | rs6552954 | 0.51 | 0.044201827 | 0.0482 |
| hCV3230038 | rs2289252 | hCV2103343 | rs4241824 | 0.51 | 0.044201827 | 0.4188 |
| hCV3230038 | rs2289252 | hCV2103388 | rs4613610 | 0.51 | 0.044201827 | 0.1193 |
| hCV3230038 | rs2289252 | hCV2103391 | rs1008728 | 0.51 | 0.044201827 | 0.2177 |
| hCV3230038 | rs2289252 | hCV2103392 | rs12500826 | 0.51 | 0.044201827 | 0.3222 |
| hCV3230038 | rs2289252 | hCV22272267 | rs3733402 | 0.51 | 0.044201827 | 0.1192 |
| hCV3230038 | rs2289252 | hCV25474413 | rs3822057 | 0.51 | 0.044201827 | 0.4122 |
| hCV3230038 | rs2289252 | hCV25474414 | rs4253399 | 0.51 | 0.044201827 | 0.7079 |
| hCV3230038 | rs2289252 | hCV25634754 | rs4253331 | 0.51 | 0.044201827 | 0.0636 |
| hCV3230038 | rs2289252 | hCV25988221 | rs9995366 | 0.51 | 0.044201827 | 0.0512 |
| hCV3230038 | rs2289252 | hCV25990131 | rs13146272 | 0.51 | 0.044201827 | 0.0944 |
| hCV3230038 | rs2289252 | hCV26038139 | rs4253405 | 0.51 | 0.044201827 | 0.2621 |
| hCV3230038 | rs2289252 | hCV26265231 | rs7684025 | 0.51 | 0.044201827 | 0.1744 |
| hCV3230038 | rs2289252 | hCV27309972 | rs13101296 | 0.51 | 0.044201827 | 0.1074 |
| hCV3230038 | rs2289252 | hCV27309991 | rs4572916 | 0.51 | 0.044201827 | 0.1232 |
| hCV3230038 | rs2289252 | hCV27474895 | rs3756011 | 0.51 | 0.044201827 | 1 |
| hCV3230038 | rs2289252 | hCV27477533 | rs3756008 | 0.51 | 0.044201827 | 0.7249 |
| hCV3230038 | rs2289252 | hCV27490984 | rs3822058 | 0.51 | 0.044201827 | 0.4054 |
| hCV3230038 | rs2289252 | hCV27521729 | rs3822056 | 0.51 | 0.044201827 | 0.0849 |
| hCV3230038 | rs2289252 | hCV27902803 | rs4862665 | 0.51 | 0.044201827 | 0.0512 |
| hCV3230038 | rs2289252 | hCV28960679 | rs6844764 | 0.51 | 0.044201827 | 0.1196 |
| hCV3230038 | rs2289252 | hCV29053261 | rs6842047 | 0.51 | 0.044201827 | 0.0472 |
| hCV3230038 | rs2289252 | hCV29053264 | rs7667777 | 0.51 | 0.044201827 | 0.1852 |
| hCV3230038 | rs2289252 | hCV29640635 | rs10029715 | 0.51 | 0.044201827 | 0.0679 |
| hCV3230038 | rs2289252 | hCV29718000 | rs4253238 | 0.51 | 0.044201827 | 0.1009 |
| hCV3230038 | rs2289252 | hCV29826351 | rs10025990 | 0.51 | 0.044201827 | 0.0882 |
| hCV3230038 | rs2289252 | hCV29877725 | rs4253295 | 0.51 | 0.044201827 | 0.1339 |
| hCV3230038 | rs2289252 | hCV30307525 | rs10025152 | 0.51 | 0.044201827 | 0.0679 |
| hCV3230038 | rs2289252 | hCV30492573 | rs10471184 | 0.51 | 0.044201827 | 0.0472 |
| hCV3230038 | rs2289252 | hCV30983902 | rs4862668 | 0.51 | 0.044201827 | 0.0748 |
| hCV3230038 | rs2289252 | hCV30983927 | rs6552962 | 0.51 | 0.044201827 | 0.0784 |
| hCV3230038 | rs2289252 | hCV32209629 | rs12715865 | 0.51 | 0.044201827 | 0.1373 |
| hCV3230038 | rs2289252 | hCV32209636 | rs11132387 | 0.51 | 0.044201827 | 0.435 |
| hCV3230038 | rs2289252 | hCV32209637 | rs13143773 | 0.51 | 0.044201827 | 0.2331 |
| hCV3230038 | rs2289252 | hCV32209638 | rs12507040 | 0.51 | 0.044201827 | 0.2973 |
| hCV3230038 | rs2289252 | hCV32291256 | rs4253406 | 0.51 | 0.044201827 | 0.0781 |
| hCV3230038 | rs2289252 | hCV32291269 | rs4253417 | 0.51 | 0.044201827 | 0.9433 |
| hCV3230038 | rs2289252 | hCV32291286 | rs4253422 | 0.51 | 0.044201827 | 0.1539 |
| hCV3230038 | rs2289252 | hCV32291287 | rs4253423 | 0.51 | 0.044201827 | 0.1539 |
| hCV3230038 | rs2289252 | hCV3229991 | rs4241815 | 0.51 | 0.044201827 | 0.1192 |
| hCV3230038 | rs2289252 | hCV3229992 | rs3775298 | 0.51 | 0.044201827 | 0.1192 |
| hCV3230038 | rs2289252 | hCV3229995 | rs11132382 | 0.51 | 0.044201827 | 0.0979 |
| hCV3230038 | rs2289252 | hCV3230002 | rs4253297 | 0.51 | 0.044201827 | 0.2015 |
| hCV3230038 | rs2289252 | hCV3230003 | rs2304595 | 0.51 | 0.044201827 | 0.2003 |
| hCV3230038 | rs2289252 | hCV3230006 | rs4253308 | 0.51 | 0.044201827 | 0.1339 |
| hCV3230038 | rs2289252 | hCV3230007 | rs4253311 | 0.51 | 0.044201827 | 0.1192 |
| hCV3230038 | rs2289252 | hCV3230010 | rs4253315 | 0.51 | 0.044201827 | 0.0748 |
| hCV3230038 | rs2289252 | hCV3230011 | rs4253320 | 0.51 | 0.044201827 | 0.2015 |
| hCV3230038 | rs2289252 | hCV3230013 | rs3775303 | 0.51 | 0.044201827 | 0.2636 |
| hCV3230038 | rs2289252 | hCV3230016 | rs4253325 | 0.51 | 0.044201827 | 0.0662 |
| hCV3230038 | rs2289252 | hCV3230017 | rs4253327 | 0.51 | 0.044201827 | 0.0771 |
| hCV3230038 | rs2289252 | hCV3230021 | rs13135645 | 0.51 | 0.044201827 | 0.0564 |
| hCV3230038 | rs2289252 | hCV3230022 | rs11132383 | 0.51 | 0.044201827 | 0.2455 |
| hCV3230038 | rs2289252 | hCV3230025 | rs3756009 | 0.51 | 0.044201827 | 0.7937 |
| hCV3230038 | rs2289252 | hCV3230030 | rs4253408 | 0.51 | 0.044201827 | 0.0719 |
| hCV3230038 | rs2289252 | hCV3230031 | rs4253419 | 0.51 | 0.044201827 | 0.1539 |
| hCV3230038 | rs2289252 | hCV3230032 | rs5974 | 0.51 | 0.044201827 | 0.1125 |
| hCV3230038 | rs2289252 | hCV3230083 | rs10013653 | 0.51 | 0.044201827 | 0.2181 |
| hCV3230038 | rs2289252 | hCV3230084 | rs7682918 | 0.51 | 0.044201827 | 0.1434 |
| hCV3230038 | rs2289252 | hCV3230094 | rs7687818 | 0.51 | 0.044201827 | 0.2201 |
| hCV3230038 | rs2289252 | hCV3230096 | rs3817184 | 0.51 | 0.044201827 | 0.1484 |
| hCV3230038 | rs2289252 | hCV3230097 | rs3736455 | 0.51 | 0.044201827 | 0.1419 |
| hCV3230038 | rs2289252 | hCV3230101 | rs6835839 | 0.51 | 0.044201827 | 0.0447 |
| hCV3230038 | rs2289252 | hCV3230106 | rs1473597 | 0.51 | 0.044201827 | 0.0873 |
| hCV3230038 | rs2289252 | hCV3230110 | rs2276917 | 0.51 | 0.044201827 | 0.0803 |
| hCV3230038 | rs2289252 | hCV3230113 | rs1053094 | 0.51 | 0.044201827 | 0.1432 |
| hCV3230038 | rs2289252 | hCV3230118 | rs4253429 | 0.51 | 0.044201827 | 0.1539 |
| hCV3230038 | rs2289252 | hCV3230119 | rs4253430 | 0.51 | 0.044201827 | 0.3973 |
| hCV3230038 | rs2289252 | hCV3230121 | rs4253431 | 0.51 | 0.044201827 | 0.0887 |
| hCV3230038 | rs2289252 | hCV3230125 | rs11938564 | 0.51 | 0.044201827 | 0.2052 |
| hCV3230038 | rs2289252 | hCV3230131 | rs13136269 | 0.51 | 0.044201827 | 0.2973 |
| hCV3230038 | rs2289252 | hCV3230133 | rs12511874 | 0.51 | 0.044201827 | 0.2104 |
| hCV3230038 | rs2289252 | hCV3230134 | rs12500151 | 0.51 | 0.044201827 | 0.3043 |
| hCV3230038 | rs2289252 | hCV3230136 | rs13116273 | 0.51 | 0.044201827 | 0.2952 |
| hCV3230038 | rs2289252 | hCV32313006 | rs4253248 | 0.51 | 0.044201827 | 0.1068 |
| hCV3230038 | rs2289252 | hCV32313007 | rs4862666 | 0.51 | 0.044201827 | 0.0512 |
| hCV3230038 | rs2289252 | hCV32313014 | rs4253243 | 0.51 | 0.044201827 | 0.0636 |
| hCV3230038 | rs2289252 | hCV32358975 | rs4253255 | 0.51 | 0.044201827 | 0.1152 |
| hCV3230038 | rs2289252 | hCV32358984 | rs4253256 | 0.51 | 0.044201827 | 0.0489 |
| hCV3230038 | rs2289252 | hCV8241628 | rs907439 | 0.51 | 0.044201827 | 0.1232 |
| hCV3230038 | rs2289252 | hCV8241630 | rs925451 | 0.51 | 0.044201827 | 0.7423 |
| hCV3230038 | rs2289252 | hCV8241631 | rs1511802 | 0.51 | 0.044201827 | 0.1452 |
| hCV3230038 | rs2289252 | hCV8241632 | rs1511801 | 0.51 | 0.044201827 | 0.1183 |
| hCV3230038 | rs2289252 | hCV8241633 | rs1511800 | 0.51 | 0.044201827 | 0.0512 |
| hCV3230038 | rs2289252 | hDV68550952 | rs4253289 | 0.51 | 0.044201827 | 0.0632 |
| hCV3230038 | rs2289252 | hDV71222711 | rs4253252 | 0.51 | 0.044201827 | 0.1068 |
| hCV3230096 | rs3817184 | hCV11786147 | rs4862662 | 0.51 | 0.10562155 | 0.9607 |
| hCV3230096 | rs3817184 | hCV11786235 | rs4253287 | 0.51 | 0.10562155 | 0.1611 |
| hCV3230096 | rs3817184 | hCV11786258 | rs4253303 | 0.51 | 0.10562155 | 0.7346 |
| hCV3230096 | rs3817184 | hCV11786259 | rs4253304 | 0.51 | 0.10562155 | 0.6556 |
| hCV3230096 | rs3817184 | hCV12066106 | rs1914926 | 0.51 | 0.10562155 | 0.1148 |
| hCV3230096 | rs3817184 | hCV12066118 | rs2048 | 0.51 | 0.10562155 | 0.3722 |
| hCV3230096 | rs3817184 | hCV12066119 | rs1912826 | 0.51 | 0.10562155 | 0.3754 |
| hCV3230096 | rs3817184 | hCV12066124 | rs2036914 | 0.51 | 0.10562155 | 0.2824 |
| hCV3230096 | rs3817184 | hCV15968025 | rs2292425 | 0.51 | 0.10562155 | 0.414 |
| hCV3230096 | rs3817184 | hCV15968026 | rs2292426 | 0.51 | 0.10562155 | 0.3737 |
| hCV3230096 | rs3817184 | hCV15968034 | rs2292428 | 0.51 | 0.10562155 | 0.4839 |
| hCV3230096 | rs3817184 | hCV15968043 | rs2292423 | 0.51 | 0.10562155 | 0.6453 |
| hCV3230096 | rs3817184 | hCV15975109 | rs2304596 | 0.51 | 0.10562155 | 0.1582 |
| hCV3230096 | rs3817184 | hCV2103343 | rs4241824 | 0.51 | 0.10562155 | 0.2431 |
| hCV3230096 | rs3817184 | hCV22272267 | rs3733402 | 0.51 | 0.10562155 | 0.3722 |
| hCV3230096 | rs3817184 | hCV25474413 | rs3822057 | 0.51 | 0.10562155 | 0.2412 |
| hCV3230096 | rs3817184 | hCV25474414 | rs4253399 | 0.51 | 0.10562155 | 0.1977 |
| hCV3230096 | rs3817184 | hCV25989001 | hCV25989001 | 0.51 | 0.10562155 | 0.1672 |
| hCV3230096 | rs3817184 | hCV25990131 | rs13146272 | 0.51 | 0.10562155 | 0.4248 |
| hCV3230096 | rs3817184 | hCV26038139 | rs4253405 | 0.51 | 0.10562155 | 0.1427 |
| hCV3230096 | rs3817184 | hCV26265231 | rs7684025 | 0.51 | 0.10562155 | 0.7723 |
| hCV3230096 | rs3817184 | hCV27474895 | rs3756011 | 0.51 | 0.10562155 | 0.1852 |
| hCV3230096 | rs3817184 | hCV27477533 | rs3756008 | 0.51 | 0.10562155 | 0.2279 |
| hCV3230096 | rs3817184 | hCV27482765 | rs3775301 | 0.51 | 0.10562155 | 0.1582 |
| hCV3230096 | rs3817184 | hCV27902808 | rs4253236 | 0.51 | 0.10562155 | 0.2369 |
| hCV3230096 | rs3817184 | hCV28960679 | rs6844764 | 0.51 | 0.10562155 | 0.4298 |
| hCV3230096 | rs3817184 | hCV29053260 | rs4861707 | 0.51 | 0.10562155 | 0.2941 |
| hCV3230096 | rs3817184 | hCV29053264 | rs7667777 | 0.51 | 0.10562155 | 1 |
| hCV3230096 | rs3817184 | hCV29053265 | rs4253244 | 0.51 | 0.10562155 | 0.2244 |
| hCV3230096 | rs3817184 | hCV29053266 | rs7687961 | 0.51 | 0.10562155 | 0.1405 |
| hCV3230096 | rs3817184 | hCV29053271 | rs6814261 | 0.51 | 0.10562155 | 0.1124 |
| hCV3230096 | rs3817184 | hCV29718000 | rs4253238 | 0.51 | 0.10562155 | 0.3705 |
| hCV3230096 | rs3817184 | hCV29877725 | rs4253295 | 0.51 | 0.10562155 | 0.7382 |
| hCV3230096 | rs3817184 | hCV30983927 | rs6552962 | 0.51 | 0.10562155 | 0.1582 |
| hCV3230096 | rs3817184 | hCV32209636 | rs11132387 | 0.51 | 0.10562155 | 0.1797 |
| hCV3230096 | rs3817184 | hCV32209638 | rs12507040 | 0.51 | 0.10562155 | 0.1135 |
| hCV3230096 | rs3817184 | hCV32291217 | rs4253323 | 0.51 | 0.10562155 | 0.1582 |
| hCV3230096 | rs3817184 | hCV32291269 | rs4253417 | 0.51 | 0.10562155 | 0.1798 |
| hCV3230096 | rs3817184 | hCV32291295 | rs4253292 | 0.51 | 0.10562155 | 0.1783 |
| hCV3230096 | rs3817184 | hCV32291301 | rs4253302 | 0.51 | 0.10562155 | 0.1573 |
| hCV3230096 | rs3817184 | hCV32295028 | rs4253260 | 0.51 | 0.10562155 | 0.1582 |
| hCV3230096 | rs3817184 | hCV3229991 | rs4241815 | 0.51 | 0.10562155 | 0.3722 |
| hCV3230096 | rs3817184 | hCV3229992 | rs3775298 | 0.51 | 0.10562155 | 0.3722 |
| hCV3230096 | rs3817184 | hCV3229995 | rs11132382 | 0.51 | 0.10562155 | 0.3745 |
| hCV3230096 | rs3817184 | hCV3230000 | rs4253294 | 0.51 | 0.10562155 | 0.1467 |
| hCV3230096 | rs3817184 | hCV3230002 | rs4253297 | 0.51 | 0.10562155 | 0.7524 |
| hCV3230096 | rs3817184 | hCV3230003 | rs2304595 | 0.51 | 0.10562155 | 0.6237 |
| hCV3230096 | rs3817184 | hCV3230006 | rs4253308 | 0.51 | 0.10562155 | 0.7382 |
| hCV3230096 | rs3817184 | hCV3230007 | rs4253311 | 0.51 | 0.10562155 | 0.3722 |
| hCV3230096 | rs3817184 | hCV3230011 | rs4253320 | 0.51 | 0.10562155 | 0.7524 |
| hCV3230096 | rs3817184 | hCV3230013 | rs3775303 | 0.51 | 0.10562155 | 0.6556 |
| hCV3230096 | rs3817184 | hCV3230014 | rs4861709 | 0.51 | 0.10562155 | 0.1467 |
| hCV3230096 | rs3817184 | hCV3230017 | rs4253327 | 0.51 | 0.10562155 | 0.207 |
| hCV3230096 | rs3817184 | hCV3230018 | rs925453 | 0.51 | 0.10562155 | 0.1144 |
| hCV3230096 | rs3817184 | hCV3230019 | rs4253332 | 0.51 | 0.10562155 | 0.1092 |
| hCV3230096 | rs3817184 | hCV3230022 | rs11132383 | 0.51 | 0.10562155 | 0.2117 |
| hCV3230096 | rs3817184 | hCV3230025 | rs3756009 | 0.51 | 0.10562155 | 0.2784 |
| hCV3230096 | rs3817184 | hCV3230038 | rs2289252 | 0.51 | 0.10562155 | 0.1484 |
| hCV3230096 | rs3817184 | hCV3230079 | rs35641294 | 0.51 | 0.10562155 | 0.1147 |
| hCV3230096 | rs3817184 | hCV3230083 | rs10013653 | 0.51 | 0.10562155 | 0.7047 |
| hCV3230096 | rs3817184 | hCV3230084 | rs7682918 | 0.51 | 0.10562155 | 0.8657 |
| hCV3230096 | rs3817184 | hCV3230094 | rs7687818 | 0.51 | 0.10562155 | 0.8722 |
| hCV3230096 | rs3817184 | hCV3230097 | rs3736455 | 0.51 | 0.10562155 | 0.367 |
| hCV3230096 | rs3817184 | hCV3230101 | rs6835839 | 0.51 | 0.10562155 | 0.451 |
| hCV3230096 | rs3817184 | hCV3230106 | rs1473597 | 0.51 | 0.10562155 | 0.4966 |
| hCV3230096 | rs3817184 | hCV3230110 | rs2276917 | 0.51 | 0.10562155 | 0.4746 |
| hCV3230096 | rs3817184 | hCV3230113 | rs1053094 | 0.51 | 0.10562155 | 0.695 |
| hCV3230096 | rs3817184 | hCV3230125 | rs11938564 | 0.51 | 0.10562155 | 0.1059 |
| hCV3230096 | rs3817184 | hCV3230131 | rs13136269 | 0.51 | 0.10562155 | 0.1135 |
| hCV3230096 | rs3817184 | hCV3230134 | rs12500151 | 0.51 | 0.10562155 | 0.1188 |
| hCV3230096 | rs3817184 | hCV32313006 | rs4253248 | 0.51 | 0.10562155 | 0.3803 |
| hCV3230096 | rs3817184 | hCV32313024 | rs4253239 | 0.51 | 0.10562155 | 0.1783 |
| hCV3230096 | rs3817184 | hCV32358975 | rs4253255 | 0.51 | 0.10562155 | 0.3585 |
| hCV3230096 | rs3817184 | hCV32358984 | rs4253256 | 0.51 | 0.10562155 | 0.2382 |
| hCV3230096 | rs3817184 | hCV8241630 | rs925451 | 0.51 | 0.10562155 | 0.2184 |
| hCV3230096 | rs3817184 | hCV8241631 | rs1511802 | 0.51 | 0.10562155 | 0.7356 |
| hCV3230096 | rs3817184 | hCV8241632 | rs1511801 | 0.51 | 0.10562155 | 0.4035 |
| hCV3230096 | rs3817184 | hDV71222711 | rs4253252 | 0.51 | 0.10562155 | 0.3803 |
| hCV3230096 | rs3817184 | hDV76175111 | rs35079309 | 0.51 | 0.10562155 | 0.1765 |
| hCV3230113 | rs1053094 | hCV11786002 | rs4862633 | 0.51 | 0.086445499 | 0.1657 |
| hCV3230113 | rs1053094 | hCV11786003 | rs4608848 | 0.51 | 0.086445499 | 0.1129 |
| hCV3230113 | rs1053094 | hCV11786022 | rs2090628 | 0.51 | 0.086445499 | 0.0928 |
| hCV3230113 | rs1053094 | hCV11786028 | rs6848963 | 0.51 | 0.086445499 | 0.1295 |
| hCV3230113 | rs1053094 | hCV11786147 | rs4862662 | 0.51 | 0.086445499 | 0.6694 |
| hCV3230113 | rs1053094 | hCV11786203 | rs4253251 | 0.51 | 0.086445499 | 0.0997 |
| hCV3230113 | rs1053094 | hCV11786258 | rs4253303 | 0.51 | 0.086445499 | 0.491 |
| hCV3230113 | rs1053094 | hCV11786259 | rs4253304 | 0.51 | 0.086445499 | 0.579 |
| hCV3230113 | rs1053094 | hCV11786307 | rs1062547 | 0.51 | 0.086445499 | 0.1175 |
| hCV3230113 | rs1053094 | hCV11786327 | rs13133050 | 0.51 | 0.086445499 | 0.1384 |
| hCV3230113 | rs1053094 | hCV12066105 | rs1519309 | 0.51 | 0.086445499 | 0.1053 |
| hCV3230113 | rs1053094 | hCV12066106 | rs1914926 | 0.51 | 0.086445499 | 0.1419 |
| hCV3230113 | rs1053094 | hCV12066116 | rs1877320 | 0.51 | 0.086445499 | 0.1094 |
| hCV3230113 | rs1053094 | hCV12066118 | rs2048 | 0.51 | 0.086445499 | 0.5759 |
| hCV3230113 | rs1053094 | hCV12066119 | rs1912826 | 0.51 | 0.086445499 | 0.5742 |
| hCV3230113 | rs1053094 | hCV12066124 | rs2036914 | 0.51 | 0.086445499 | 0.3142 |
| hCV3230113 | rs1053094 | hCV15811716 | rs2102575 | 0.51 | 0.086445499 | 0.1014 |
| hCV3230113 | rs1053094 | hCV1589303 | rs11730434 | 0.51 | 0.086445499 | 0.1249 |
| hCV3230113 | rs1053094 | hCV1589308 | rs9998530 | 0.51 | 0.086445499 | 0.1249 |
| hCV3230113 | rs1053094 | hCV15968025 | rs2292425 | 0.51 | 0.086445499 | 0.1645 |
| hCV3230113 | rs1053094 | hCV15968026 | rs2292426 | 0.51 | 0.086445499 | 0.2198 |
| hCV3230113 | rs1053094 | hCV15968034 | rs2292428 | 0.51 | 0.086445499 | 0.6489 |
| hCV3230113 | rs1053094 | hCV15968043 | rs2292423 | 0.51 | 0.086445499 | 0.59 |
| hCV3230113 | rs1053094 | hCV15975109 | rs2304596 | 0.51 | 0.086445499 | 0.2245 |
| hCV3230113 | rs1053094 | hCV16172925 | rs2241818 | 0.51 | 0.086445499 | 0.0959 |
| hCV3230113 | rs1053094 | hCV16172935 | rs2241817 | 0.51 | 0.086445499 | 0.0973 |
| hCV3230113 | rs1053094 | hCV2103337 | rs13102931 | 0.51 | 0.086445499 | 0.0958 |
| hCV3230113 | rs1053094 | hCV2103343 | rs4241824 | 0.51 | 0.086445499 | 0.2774 |
| hCV3230113 | rs1053094 | hCV2103391 | rs1008728 | 0.51 | 0.086445499 | 0.1352 |
| hCV3230113 | rs1053094 | hCV2103392 | rs12500826 | 0.51 | 0.086445499 | 0.1352 |
| hCV3230113 | rs1053094 | hCV2103402 | rs9993749 | 0.51 | 0.086445499 | 0.115 |
| hCV3230113 | rs1053094 | hCV22271609 | rs4253326 | 0.51 | 0.086445499 | 0.1496 |
| hCV3230113 | rs1053094 | hCV22272267 | rs3733402 | 0.51 | 0.086445499 | 0.5831 |
| hCV3230113 | rs1053094 | hCV25474413 | rs3822057 | 0.51 | 0.086445499 | 0.2648 |
| hCV3230113 | rs1053094 | hCV25474414 | rs4253399 | 0.51 | 0.086445499 | 0.2252 |
| hCV3230113 | rs1053094 | hCV25634763 | rs4253241 | 0.51 | 0.086445499 | 0.1111 |
| hCV3230113 | rs1053094 | hCV25634781 | rs4253299 | 0.51 | 0.086445499 | 0.1041 |
| hCV3230113 | rs1053094 | hCV25988221 | rs9995366 | 0.51 | 0.086445499 | 0.1117 |
| hCV3230113 | rs1053094 | hCV25989001 | hCV25989001 | 0.51 | 0.086445499 | 0.2371 |
| hCV3230113 | rs1053094 | hCV25990131 | rs13146272 | 0.51 | 0.086445499 | 0.1593 |
| hCV3230113 | rs1053094 | hCV26038139 | rs4253405 | 0.51 | 0.086445499 | 0.1405 |
| hCV3230113 | rs1053094 | hCV26265197 | rs10014399 | 0.51 | 0.086445499 | 0.096 |
| hCV3230113 | rs1053094 | hCV26265199 | rs2221843 | 0.51 | 0.086445499 | 0.1041 |
| hCV3230113 | rs1053094 | hCV26265231 | rs7684025 | 0.51 | 0.086445499 | 0.7049 |
| hCV3230113 | rs1053094 | hCV27310170 | rs4862644 | 0.51 | 0.086445499 | 0.1611 |
| hCV3230113 | rs1053094 | hCV27310180 | rs11722584 | 0.51 | 0.086445499 | 0.1383 |
| hCV3230113 | rs1053094 | hCV27310216 | rs10018625 | 0.51 | 0.086445499 | 0.102 |
| hCV3230113 | rs1053094 | hCV27310218 | rs9992614 | 0.51 | 0.086445499 | 0.0932 |
| hCV3230113 | rs1053094 | hCV27310253 | rs13108688 | 0.51 | 0.086445499 | 0.1242 |
| hCV3230113 | rs1053094 | hCV27310255 | rs7657186 | 0.51 | 0.086445499 | 0.1279 |
| hCV3230113 | rs1053094 | hCV27474895 | rs3756011 | 0.51 | 0.086445499 | 0.1126 |
| hCV3230113 | rs1053094 | hCV27477533 | rs3756008 | 0.51 | 0.086445499 | 0.2208 |
| hCV3230113 | rs1053094 | hCV27482765 | rs3775301 | 0.51 | 0.086445499 | 0.2245 |
| hCV3230113 | rs1053094 | hCV27490984 | rs3822058 | 0.51 | 0.086445499 | 0.096 |
| hCV3230113 | rs1053094 | hCV27506149 | rs3822055 | 0.51 | 0.086445499 | 0.1041 |
| hCV3230113 | rs1053094 | hCV27902803 | rs4862665 | 0.51 | 0.086445499 | 0.1117 |
| hCV3230113 | rs1053094 | hCV27902808 | rs4253236 | 0.51 | 0.086445499 | 0.3483 |
| hCV3230113 | rs1053094 | hCV28960679 | rs6844764 | 0.51 | 0.086445499 | 0.1995 |
| hCV3230113 | rs1053094 | hCV29053260 | rs4861707 | 0.51 | 0.086445499 | 0.0954 |
| hCV3230113 | rs1053094 | hCV29053261 | rs6842047 | 0.51 | 0.086445499 | 0.1117 |
| hCV3230113 | rs1053094 | hCV29053264 | rs7667777 | 0.51 | 0.086445499 | 0.6901 |
| hCV3230113 | rs1053094 | hCV29053265 | rs4253244 | 0.51 | 0.086445499 | 0.3493 |
| hCV3230113 | rs1053094 | hCV29053271 | rs6814261 | 0.51 | 0.086445499 | 0.0876 |
| hCV3230113 | rs1053094 | hCV29718000 | rs4253238 | 0.51 | 0.086445499 | 0.552 |
| hCV3230113 | rs1053094 | hCV29877725 | rs4253295 | 0.51 | 0.086445499 | 0.5019 |
| hCV3230113 | rs1053094 | hCV30492573 | rs10471184 | 0.51 | 0.086445499 | 0.1117 |
| hCV3230113 | rs1053094 | hCV30983902 | rs4862668 | 0.51 | 0.086445499 | 0.1111 |
| hCV3230113 | rs1053094 | hCV30983907 | rs4253246 | 0.51 | 0.086445499 | 0.1111 |
| hCV3230113 | rs1053094 | hCV32209636 | rs11132387 | 0.51 | 0.086445499 | 0.1091 |
| hCV3230113 | rs1053094 | hCV32209637 | rs13143773 | 0.51 | 0.086445499 | 0.096 |
| hCV3230113 | rs1053094 | hCV32209638 | rs12507040 | 0.51 | 0.086445499 | 0.0986 |
| hCV3230113 | rs1053094 | hCV32209919 | rs11730526 | 0.51 | 0.086445499 | 0.1298 |
| hCV3230113 | rs1053094 | hCV32209928 | rs13148663 | 0.51 | 0.086445499 | 0.1277 |
| hCV3230113 | rs1053094 | hCV32291217 | rs4253323 | 0.51 | 0.086445499 | 0.2245 |
| hCV3230113 | rs1053094 | hCV32291269 | rs4253417 | 0.51 | 0.086445499 | 0.1699 |
| hCV3230113 | rs1053094 | hCV32291286 | rs4253422 | 0.51 | 0.086445499 | 0.2024 |
| hCV3230113 | rs1053094 | hCV32291287 | rs4253423 | 0.51 | 0.086445499 | 0.2024 |
| hCV3230113 | rs1053094 | hCV32291295 | rs4253292 | 0.51 | 0.086445499 | 0.2276 |
| hCV3230113 | rs1053094 | hCV32291301 | rs4253302 | 0.51 | 0.086445499 | 0.224 |
| hCV3230113 | rs1053094 | hCV32295028 | rs4253260 | 0.51 | 0.086445499 | 0.2245 |
| hCV3230113 | rs1053094 | hCV3229991 | rs4241815 | 0.51 | 0.086445499 | 0.5831 |
| hCV3230113 | rs1053094 | hCV3229992 | rs3775298 | 0.51 | 0.086445499 | 0.5831 |
| hCV3230113 | rs1053094 | hCV3229995 | rs11132382 | 0.51 | 0.086445499 | 0.552 |
| hCV3230113 | rs1053094 | hCV3230000 | rs4253294 | 0.51 | 0.086445499 | 0.2474 |
| hCV3230113 | rs1053094 | hCV3230001 | rs4253296 | 0.51 | 0.086445499 | 0.1111 |
| hCV3230113 | rs1053094 | hCV3230002 | rs4253297 | 0.51 | 0.086445499 | 0.5144 |
| hCV3230113 | rs1053094 | hCV3230003 | rs2304595 | 0.51 | 0.086445499 | 0.573 |
| hCV3230113 | rs1053094 | hCV3230004 | rs4253301 | 0.51 | 0.086445499 | 0.1014 |
| hCV3230113 | rs1053094 | hCV3230006 | rs4253308 | 0.51 | 0.086445499 | 0.5019 |
| hCV3230113 | rs1053094 | hCV3230007 | rs4253311 | 0.51 | 0.086445499 | 0.5831 |
| hCV3230113 | rs1053094 | hCV3230011 | rs4253320 | 0.51 | 0.086445499 | 0.5144 |
| hCV3230113 | rs1053094 | hCV3230012 | rs4241821 | 0.51 | 0.086445499 | 0.1041 |
| hCV3230113 | rs1053094 | hCV3230013 | rs3775303 | 0.51 | 0.086445499 | 0.579 |
| hCV3230113 | rs1053094 | hCV3230014 | rs4861709 | 0.51 | 0.086445499 | 0.2474 |
| hCV3230113 | rs1053094 | hCV3230017 | rs4253327 | 0.51 | 0.086445499 | 0.1179 |
| hCV3230113 | rs1053094 | hCV3230018 | rs925453 | 0.51 | 0.086445499 | 0.2496 |
| hCV3230113 | rs1053094 | hCV3230019 | rs4253332 | 0.51 | 0.086445499 | 0.2496 |
| hCV3230113 | rs1053094 | hCV3230022 | rs11132383 | 0.51 | 0.086445499 | 0.1336 |
| hCV3230113 | rs1053094 | hCV3230025 | rs3756009 | 0.51 | 0.086445499 | 0.1859 |
| hCV3230113 | rs1053094 | hCV3230031 | rs4253419 | 0.51 | 0.086445499 | 0.2024 |
| hCV3230113 | rs1053094 | hCV3230038 | rs2289252 | 0.51 | 0.086445499 | 0.1432 |
| hCV3230113 | rs1053094 | hCV3230079 | rs35641294 | 0.51 | 0.086445499 | 0.0879 |
| hCV3230113 | rs1053094 | hCV3230081 | rs10866290 | 0.51 | 0.086445499 | 0.1232 |
| hCV3230113 | rs1053094 | hCV3230083 | rs10013653 | 0.51 | 0.086445499 | 0.5963 |
| hCV3230113 | rs1053094 | hCV3230084 | rs7682918 | 0.51 | 0.086445499 | 0.5711 |
| hCV3230113 | rs1053094 | hCV3230094 | rs7687818 | 0.51 | 0.086445499 | 0.7766 |
| hCV3230113 | rs1053094 | hCV3230096 | rs3817184 | 0.51 | 0.086445499 | 0.695 |
| hCV3230113 | rs1053094 | hCV3230097 | rs3736455 | 0.51 | 0.086445499 | 0.2344 |
| hCV3230113 | rs1053094 | hCV3230101 | rs6835839 | 0.51 | 0.086445499 | 0.6667 |
| hCV3230113 | rs1053094 | hCV3230106 | rs1473597 | 0.51 | 0.086445499 | 0.6384 |
| hCV3230113 | rs1053094 | hCV3230110 | rs2276917 | 0.51 | 0.086445499 | 0.6489 |
| hCV3230113 | rs1053094 | hCV3230118 | rs4253429 | 0.51 | 0.086445499 | 0.2024 |
| hCV3230113 | rs1053094 | hCV3230119 | rs4253430 | 0.51 | 0.086445499 | 0.096 |
| hCV3230113 | rs1053094 | hCV3230125 | rs11938564 | 0.51 | 0.086445499 | 0.1519 |
| hCV3230113 | rs1053094 | hCV3230131 | rs13136269 | 0.51 | 0.086445499 | 0.0986 |
| hCV3230113 | rs1053094 | hCV3230133 | rs12511874 | 0.51 | 0.086445499 | 0.0986 |
| hCV3230113 | rs1053094 | hCV3230134 | rs12500151 | 0.51 | 0.086445499 | 0.0986 |
| hCV3230113 | rs1053094 | hCV3230136 | rs13116273 | 0.51 | 0.086445499 | 0.1269 |
| hCV3230113 | rs1053094 | hCV32313006 | rs4253248 | 0.51 | 0.086445499 | 0.552 |
| hCV3230113 | rs1053094 | hCV32313007 | rs4862666 | 0.51 | 0.086445499 | 0.1117 |
| hCV3230113 | rs1053094 | hCV32313024 | rs4253239 | 0.51 | 0.086445499 | 0.2276 |
| hCV3230113 | rs1053094 | hCV32358975 | rs4253255 | 0.51 | 0.086445499 | 0.573 |
| hCV3230113 | rs1053094 | hCV32358984 | rs4253256 | 0.51 | 0.086445499 | 0.3678 |
| hCV3230113 | rs1053094 | hCV441385 | rs1983369 | 0.51 | 0.086445499 | 0.1249 |
| hCV3230113 | rs1053094 | hCV79084 | rs1519312 | 0.51 | 0.086445499 | 0.1129 |
| hCV3230113 | rs1053094 | hCV8241630 | rs925451 | 0.51 | 0.086445499 | 0.207 |
| hCV3230113 | rs1053094 | hCV8241631 | rs1511802 | 0.51 | 0.086445499 | 0.5019 |
| hCV3230113 | rs1053094 | hCV8241632 | rs1511801 | 0.51 | 0.086445499 | 0.6225 |
| hCV3230113 | rs1053094 | hCV8241633 | rs1511800 | 0.51 | 0.086445499 | 0.1117 |
| hCV3230113 | rs1053094 | hCV8241661 | rs1715051 | 0.51 | 0.086445499 | 0.1249 |
| hCV3230113 | rs1053094 | hDV71222711 | rs4253252 | 0.51 | 0.086445499 | 0.552 |
| hCV3230113 | rs1053094 | hDV76175111 | rs35079309 | 0.51 | 0.086445499 | 0.2766 |
| hCV596331 | rs6048 | hCV2288124 | rs440051 | 0.51 | 0.256432106 | 0.4103 |
| hCV596331 | rs6048 | hCV26016183 | rs9887617 | 0.51 | 0.256432106 | 0.3131 |
| hCV596331 | rs6048 | hCV26225376 | rs3117074 | 0.51 | 0.256432106 | 0.4074 |
| hCV596331 | rs6048 | hCV26225377 | rs12008759 | 0.51 | 0.256432106 | 0.4103 |
| hCV596331 | rs6048 | hCV2969899 | rs434144 | 0.51 | 0.256432106 | 0.3772 |
| hCV596331 | rs6048 | hCV2969900 | rs434447 | 0.51 | 0.256432106 | 0.4074 |
| hCV596331 | rs6048 | hCV2986569 | rs11095801 | 0.51 | 0.256432106 | 0.4074 |
| hCV596331 | rs6048 | hCV2986570 | rs3117458 | 0.51 | 0.256432106 | 0.3714 |
| hCV596331 | rs6048 | hCV2986572 | rs4149670 | 0.51 | 0.256432106 | 0.4393 |
| hCV596331 | rs6048 | hCV2986574 | rs4149672 | 0.51 | 0.256432106 | 0.602 |
| hCV596331 | rs6048 | hCV2986575 | rs4149674 | 0.51 | 0.256432106 | 0.602 |
| hCV596331 | rs6048 | hCV596323 | rs438601 | 0.51 | 0.256432106 | 0.5056 |
| hCV596331 | rs6048 | hCV596326 | rs398101 | 0.51 | 0.256432106 | 0.8045 |
| hCV596331 | rs6048 | hCV596330 | rs422187 | 0.51 | 0.256432106 | 0.9745 |
| hCV596331 | rs6048 | hCV596335 | rs413957 | 0.51 | 0.256432106 | 0.4074 |
| hCV596331 | rs6048 | hCV596336 | rs110583 | 0.51 | 0.256432106 | 0.4329 |
| hCV596331 | rs6048 | hCV596337 | rs421766 | 0.51 | 0.256432106 | 0.4329 |
| hCV596331 | rs6048 | hCV596339 | rs370713 | 0.51 | 0.256432106 | 0.4103 |
| hCV596331 | rs6048 | hCV596340 | rs413536 | 0.51 | 0.256432106 | 0.3724 |
| hCV596331 | rs6048 | hCV596344 | rs445691 | 0.51 | 0.256432106 | 0.4103 |
| hCV596331 | rs6048 | hCV596669 | rs376165 | 0.51 | 0.256432106 | 0.6589 |
| hCV596331 | rs6048 | hDV70794854 | rs17002122 | 0.51 | 0.256432106 | 0.3457 |
| hCV596331 | rs6048 | hDV71066592 | rs17002116 | 0.51 | 0.256432106 | 0.2766 |
| hCV596331 | rs6048 | hDV76976791 | rs4149758 | 0.51 | 0.256432106 | 0.3068 |
| hCV8241630 | rs925451 | hCV11786147 | rs4862662 | 0.51 | 0.047967528 | 0.1977 |
| hCV8241630 | rs925451 | hCV11786235 | rs4253287 | 0.51 | 0.047967528 | 0.0779 |
| hCV8241630 | rs925451 | hCV11786258 | rs4253303 | 0.51 | 0.047967528 | 0.2889 |
| hCV8241630 | rs925451 | hCV11786259 | rs4253304 | 0.51 | 0.047967528 | 0.3548 |
| hCV8241630 | rs925451 | hCV11786295 | rs4253421 | 0.51 | 0.047967528 | 0.0512 |
| hCV8241630 | rs925451 | hCV11786307 | rs1062547 | 0.51 | 0.047967528 | 0.3046 |
| hCV8241630 | rs925451 | hCV11786327 | rs13133050 | 0.51 | 0.047967528 | 0.1424 |
| hCV8241630 | rs925451 | hCV12066116 | rs1877320 | 0.51 | 0.047967528 | 0.0806 |
| hCV8241630 | rs925451 | hCV12066118 | rs2048 | 0.51 | 0.047967528 | 0.1423 |
| hCV8241630 | rs925451 | hCV12066119 | rs1912826 | 0.51 | 0.047967528 | 0.1513 |
| hCV8241630 | rs925451 | hCV12066124 | rs2036914 | 0.51 | 0.047967528 | 0.5632 |
| hCV8241630 | rs925451 | hCV12066129 | rs1593 | 0.51 | 0.047967528 | 0.0859 |
| hCV8241630 | rs925451 | hCV1333083 | rs10022988 | 0.51 | 0.047967528 | 0.0533 |
| hCV8241630 | rs925451 | hCV1333090 | rs6816112 | 0.51 | 0.047967528 | 0.0839 |
| hCV8241630 | rs925451 | hCV1333097 | rs4862680 | 0.51 | 0.047967528 | 0.0533 |
| hCV8241630 | rs925451 | hCV1333099 | rs10020635 | 0.51 | 0.047967528 | 0.0737 |
| hCV8241630 | rs925451 | hCV15793897 | rs3087505 | 0.51 | 0.047967528 | 0.0621 |
| hCV8241630 | rs925451 | hCV15811716 | rs2102575 | 0.51 | 0.047967528 | 0.0585 |
| hCV8241630 | rs925451 | hCV15968025 | rs2292425 | 0.51 | 0.047967528 | 0.1498 |
| hCV8241630 | rs925451 | hCV15968026 | rs2292426 | 0.51 | 0.047967528 | 0.2045 |
| hCV8241630 | rs925451 | hCV15968034 | rs2292428 | 0.51 | 0.047967528 | 0.1077 |
| hCV8241630 | rs925451 | hCV15968043 | rs2292423 | 0.51 | 0.047967528 | 0.338 |
| hCV8241630 | rs925451 | hCV16172925 | rs2241818 | 0.51 | 0.047967528 | 0.0837 |
| hCV8241630 | rs925451 | hCV16172935 | rs2241817 | 0.51 | 0.047967528 | 0.287 |
| hCV8241630 | rs925451 | hCV2103343 | rs4241824 | 0.51 | 0.047967528 | 0.605 |
| hCV8241630 | rs925451 | hCV2103348 | rs11931515 | 0.51 | 0.047967528 | 0.0499 |
| hCV8241630 | rs925451 | hCV2103388 | rs4613610 | 0.51 | 0.047967528 | 0.0893 |
| hCV8241630 | rs925451 | hCV2103391 | rs1008728 | 0.51 | 0.047967528 | 0.1739 |
| hCV8241630 | rs925451 | hCV2103392 | rs12500826 | 0.51 | 0.047967528 | 0.3352 |
| hCV8241630 | rs925451 | hCV22272267 | rs3733402 | 0.51 | 0.047967528 | 0.1476 |
| hCV8241630 | rs925451 | hCV25474413 | rs3822057 | 0.51 | 0.047967528 | 0.596 |
| hCV8241630 | rs925451 | hCV25474414 | rs4253399 | 0.51 | 0.047967528 | 0.9606 |
| hCV8241630 | rs925451 | hCV25634754 | rs4253331 | 0.51 | 0.047967528 | 0.0907 |
| hCV8241630 | rs925451 | hCV25988221 | rs9995366 | 0.51 | 0.047967528 | 0.0657 |
| hCV8241630 | rs925451 | hCV25990131 | rs13146272 | 0.51 | 0.047967528 | 0.1564 |
| hCV8241630 | rs925451 | hCV26038139 | rs4253405 | 0.51 | 0.047967528 | 0.3823 |
| hCV8241630 | rs925451 | hCV26265231 | rs7684025 | 0.51 | 0.047967528 | 0.2509 |
| hCV8241630 | rs925451 | hCV27309972 | rs13101296 | 0.51 | 0.047967528 | 0.1189 |
| hCV8241630 | rs925451 | hCV27309991 | rs4572916 | 0.51 | 0.047967528 | 0.0972 |
| hCV8241630 | rs925451 | hCV27473099 | rs3733403 | 0.51 | 0.047967528 | 0.078 |
| hCV8241630 | rs925451 | hCV27474895 | rs3756011 | 0.51 | 0.047967528 | 0.7876 |
| hCV8241630 | rs925451 | hCV27477533 | rs3756008 | 0.51 | 0.047967528 | 0.9804 |
| hCV8241630 | rs925451 | hCV27490984 | rs3822058 | 0.51 | 0.047967528 | 0.2976 |
| hCV8241630 | rs925451 | hCV27521729 | rs3822056 | 0.51 | 0.047967528 | 0.096 |
| hCV8241630 | rs925451 | hCV27902803 | rs4862665 | 0.51 | 0.047967528 | 0.0657 |
| hCV8241630 | rs925451 | hCV27902808 | rs4253236 | 0.51 | 0.047967528 | 0.0514 |
| hCV8241630 | rs925451 | hCV28960679 | rs6844764 | 0.51 | 0.047967528 | 0.1817 |
| hCV8241630 | rs925451 | hCV29053261 | rs6842047 | 0.51 | 0.047967528 | 0.0621 |
| hCV8241630 | rs925451 | hCV29053264 | rs7667777 | 0.51 | 0.047967528 | 0.2641 |
| hCV8241630 | rs925451 | hCV29053265 | rs4253244 | 0.51 | 0.047967528 | 0.0566 |
| hCV8241630 | rs925451 | hCV29718000 | rs4253238 | 0.51 | 0.047967528 | 0.1666 |
| hCV8241630 | rs925451 | hCV29826351 | rs10025990 | 0.51 | 0.047967528 | 0.0954 |
| hCV8241630 | rs925451 | hCV29877725 | rs4253295 | 0.51 | 0.047967528 | 0.2376 |
| hCV8241630 | rs925451 | hCV30492573 | rs10471184 | 0.51 | 0.047967528 | 0.0621 |
| hCV8241630 | rs925451 | hCV30983902 | rs4862668 | 0.51 | 0.047967528 | 0.0806 |
| hCV8241630 | rs925451 | hCV30983927 | rs6552962 | 0.51 | 0.047967528 | 0.0884 |
| hCV8241630 | rs925451 | hCV32209629 | rs12715865 | 0.51 | 0.047967528 | 0.1026 |
| hCV8241630 | rs925451 | hCV32209636 | rs11132387 | 0.51 | 0.047967528 | 0.3826 |
| hCV8241630 | rs925451 | hCV32209637 | rs13143773 | 0.51 | 0.047967528 | 0.2155 |
| hCV8241630 | rs925451 | hCV32209638 | rs12507040 | 0.51 | 0.047967528 | 0.2055 |
| hCV8241630 | rs925451 | hCV32291256 | rs4253406 | 0.51 | 0.047967528 | 0.1121 |
| hCV8241630 | rs925451 | hCV32291269 | rs4253417 | 0.51 | 0.047967528 | 0.7639 |
| hCV8241630 | rs925451 | hCV32291286 | rs4253422 | 0.51 | 0.047967528 | 0.1422 |
| hCV8241630 | rs925451 | hCV32291287 | rs4253423 | 0.51 | 0.047967528 | 0.1422 |
| hCV8241630 | rs925451 | hCV32291295 | rs4253292 | 0.51 | 0.047967528 | 0.0633 |
| hCV8241630 | rs925451 | hCV3229991 | rs4241815 | 0.51 | 0.047967528 | 0.1476 |
| hCV8241630 | rs925451 | hCV3229992 | rs3775298 | 0.51 | 0.047967528 | 0.1476 |
| hCV8241630 | rs925451 | hCV3229995 | rs11132382 | 0.51 | 0.047967528 | 0.1645 |
| hCV8241630 | rs925451 | hCV3230000 | rs4253294 | 0.51 | 0.047967528 | 0.0677 |
| hCV8241630 | rs925451 | hCV3230002 | rs4253297 | 0.51 | 0.047967528 | 0.2853 |
| hCV8241630 | rs925451 | hCV3230003 | rs2304595 | 0.51 | 0.047967528 | 0.3258 |
| hCV8241630 | rs925451 | hCV3230004 | rs4253301 | 0.51 | 0.047967528 | 0.0548 |
| hCV8241630 | rs925451 | hCV3230006 | rs4253308 | 0.51 | 0.047967528 | 0.2376 |
| hCV8241630 | rs925451 | hCV3230007 | rs4253311 | 0.51 | 0.047967528 | 0.1476 |
| hCV8241630 | rs925451 | hCV3230010 | rs4253315 | 0.51 | 0.047967528 | 0.0806 |
| hCV8241630 | rs925451 | hCV3230011 | rs4253320 | 0.51 | 0.047967528 | 0.2853 |
| hCV8241630 | rs925451 | hCV3230013 | rs3775303 | 0.51 | 0.047967528 | 0.3548 |
| hCV8241630 | rs925451 | hCV3230014 | rs4861709 | 0.51 | 0.047967528 | 0.0677 |
| hCV8241630 | rs925451 | hCV3230016 | rs4253325 | 0.51 | 0.047967528 | 0.0805 |
| hCV8241630 | rs925451 | hCV3230017 | rs4253327 | 0.51 | 0.047967528 | 0.1125 |
| hCV8241630 | rs925451 | hCV3230018 | rs925453 | 0.51 | 0.047967528 | 0.0593 |
| hCV8241630 | rs925451 | hCV3230019 | rs4253332 | 0.51 | 0.047967528 | 0.0554 |
| hCV8241630 | rs925451 | hCV3230021 | rs13135645 | 0.51 | 0.047967528 | 0.0814 |
| hCV8241630 | rs925451 | hCV3230022 | rs11132383 | 0.51 | 0.047967528 | 0.3677 |
| hCV8241630 | rs925451 | hCV3230025 | rs3756009 | 0.51 | 0.047967528 | 1 |
| hCV8241630 | rs925451 | hCV3230030 | rs4253408 | 0.51 | 0.047967528 | 0.1145 |
| hCV8241630 | rs925451 | hCV3230031 | rs4253419 | 0.51 | 0.047967528 | 0.1422 |
| hCV8241630 | rs925451 | hCV3230038 | rs2289252 | 0.51 | 0.047967528 | 0.7423 |
| hCV8241630 | rs925451 | hCV3230051 | rs4862658 | 0.51 | 0.047967528 | 0.0538 |
| hCV8241630 | rs925451 | hCV3230083 | rs10013653 | 0.51 | 0.047967528 | 0.2951 |
| hCV8241630 | rs925451 | hCV3230084 | rs7682918 | 0.51 | 0.047967528 | 0.2117 |
| hCV8241630 | rs925451 | hCV3230094 | rs7687818 | 0.51 | 0.047967528 | 0.3063 |
| hCV8241630 | rs925451 | hCV3230096 | rs3817184 | 0.51 | 0.047967528 | 0.2184 |
| hCV8241630 | rs925451 | hCV3230097 | rs3736455 | 0.51 | 0.047967528 | 0.2161 |
| hCV8241630 | rs925451 | hCV3230101 | rs6835839 | 0.51 | 0.047967528 | 0.0876 |
| hCV8241630 | rs925451 | hCV3230106 | rs1473597 | 0.51 | 0.047967528 | 0.127 |
| hCV8241630 | rs925451 | hCV3230110 | rs2276917 | 0.51 | 0.047967528 | 0.1184 |
| hCV8241630 | rs925451 | hCV3230113 | rs1053094 | 0.51 | 0.047967528 | 0.207 |
| hCV8241630 | rs925451 | hCV3230118 | rs4253429 | 0.51 | 0.047967528 | 0.1422 |
| hCV8241630 | rs925451 | hCV3230119 | rs4253430 | 0.51 | 0.047967528 | 0.2905 |
| hCV8241630 | rs925451 | hCV3230125 | rs11938564 | 0.51 | 0.047967528 | 0.1896 |
| hCV8241630 | rs925451 | hCV3230131 | rs13136269 | 0.51 | 0.047967528 | 0.2055 |
| hCV8241630 | rs925451 | hCV3230133 | rs12511874 | 0.51 | 0.047967528 | 0.1512 |
| hCV8241630 | rs925451 | hCV3230134 | rs12500151 | 0.51 | 0.047967528 | 0.2115 |
| hCV8241630 | rs925451 | hCV3230136 | rs13116273 | 0.51 | 0.047967528 | 0.229 |
| hCV8241630 | rs925451 | hCV32313006 | rs4253248 | 0.51 | 0.047967528 | 0.1736 |
| hCV8241630 | rs925451 | hCV32313007 | rs4862666 | 0.51 | 0.047967528 | 0.0657 |
| hCV8241630 | rs925451 | hCV32313014 | rs4253243 | 0.51 | 0.047967528 | 0.0907 |
| hCV8241630 | rs925451 | hCV32313024 | rs4253239 | 0.51 | 0.047967528 | 0.0633 |
| hCV8241630 | rs925451 | hCV32358975 | rs4253255 | 0.51 | 0.047967528 | 0.1454 |
| hCV8241630 | rs925451 | hCV32358984 | rs4253256 | 0.51 | 0.047967528 | 0.0647 |
| hCV8241630 | rs925451 | hCV8241628 | rs907439 | 0.51 | 0.047967528 | 0.0972 |
| hCV8241630 | rs925451 | hCV8241631 | rs1511802 | 0.51 | 0.047967528 | 0.2539 |
| hCV8241630 | rs925451 | hCV8241632 | rs1511801 | 0.51 | 0.047967528 | 0.1877 |
| hCV8241630 | rs925451 | hCV8241633 | rs1511800 | 0.51 | 0.047967528 | 0.0657 |
| hCV8241630 | rs925451 | hDV68550952 | rs4253289 | 0.51 | 0.047967528 | 0.0659 |
| hCV8241630 | rs925451 | hDV71222711 | rs4253252 | 0.51 | 0.047967528 | 0.1736 |
| hCV8717873 | rs1613662 | hCV11977629 | rs1654459 | 0.51 | 0.291390182 | 0.824 |
| hCV8717873 | rs1613662 | hCV1376257 | rs10416380 | 0.51 | 0.291390182 | 0.688 |
| hCV8717873 | rs1613662 | hCV1376262 | rs1671150 | 0.51 | 0.291390182 | 0.7101 |
| hCV8717873 | rs1613662 | hCV1376264 | rs1671151 | 0.51 | 0.291390182 | 0.7101 |
| hCV8717873 | rs1613662 | hCV1376265 | rs1671152 | 0.51 | 0.291390182 | 0.881 |
| hCV8717873 | rs1613662 | hCV1376266 | rs1654413 | 0.51 | 0.291390182 | 0.8292 |
| hCV8717873 | rs1613662 | hCV1376342 | rs1654416 | 0.51 | 0.291390182 | 0.7313 |
| hCV8717873 | rs1613662 | hCV1376359 | rs2886412 | 0.51 | 0.291390182 | 0.8039 |
| hCV8717873 | rs1613662 | hCV1376386 | rs1671214 | 0.51 | 0.291390182 | 0.4218 |
| hCV8717873 | rs1613662 | hCV1376388 | rs1671215 | 0.51 | 0.291390182 | 0.4218 |
| hCV8717873 | rs1613662 | hCV1376414 | rs1671171 | 0.51 | 0.291390182 | 0.4652 |
| hCV8717873 | rs1613662 | hCV15973734 | rs2304167 | 0.51 | 0.291390182 | 0.7101 |
| hCV8717873 | rs1613662 | hCV16044361 | rs2569513 | 0.51 | 0.291390182 | 0.8557 |
| hCV8717873 | rs1613662 | hCV26895244 | rs1671153 | 0.51 | 0.291390182 | 0.7101 |
| hCV8717873 | rs1613662 | hCV26895257 | rs2886415 | 0.51 | 0.291390182 | 0.8732 |
| hCV8717873 | rs1613662 | hCV29271569 | rs1626971 | 0.51 | 0.291390182 | 0.8853 |
| hCV8717873 | rs1613662 | hCV31722831 | rs11671922 | 0.51 | 0.291390182 | 0.8358 |
| hCV8717873 | rs1613662 | hCV31722832 | rs11084381 | 0.51 | 0.291390182 | 0.8192 |
| hCV8717873 | rs1613662 | hCV31722834 | rs11084382 | 0.51 | 0.291390182 | 0.7187 |
| hCV8717873 | rs1613662 | hCV31722835 | rs11668169 | 0.51 | 0.291390182 | 0.8188 |
| hCV8717873 | rs1613662 | hCV31722836 | rs11672026 | 0.51 | 0.291390182 | 0.8093 |
| hCV8717873 | rs1613662 | hCV7841075 | rs1671196 | 0.51 | 0.291390182 | 0.8192 |
| hCV8717873 | rs1613662 | hCV8703249 | rs1654444 | 0.51 | 0.291390182 | 0.8822 |
| hCV8717873 | rs1613662 | hCV8704962 | rs775893 | 0.51 | 0.291390182 | 0.5398 |
| hCV8717873 | rs1613662 | hCV8717751 | rs1671218 | 0.51 | 0.291390182 | 0.4141 |
| hCV8717873 | rs1613662 | hCV8717752 | rs1671217 | 0.51 | 0.291390182 | 0.8853 |
| hCV8717873 | rs1613662 | hCV8717761 | rs1654439 | 0.51 | 0.291390182 | 0.776 |
| hCV8717873 | rs1613662 | hCV8717793 | rs1654433 | 0.51 | 0.291390182 | 0.8557 |
| hCV8717873 | rs1613662 | hCV8717794 | rs1654432 | 0.51 | 0.291390182 | 0.8557 |
| hCV8717873 | rs1613662 | hCV8717845 | rs892090 | 0.51 | 0.291390182 | 1 |
| hCV8717873 | rs1613662 | hCV8717846 | rs892089 | 0.51 | 0.291390182 | 0.8358 |
| hCV8717873 | rs1613662 | hCV8717871 | rs1654421 | 0.51 | 0.291390182 | 0.6875 |
| hCV8717873 | rs1613662 | hCV8717881 | rs1654420 | 0.51 | 0.291390182 | 0.8188 |
| hCV8717873 | rs1613662 | hCV8717893 | rs1671192 | 0.51 | 0.291390182 | 0.8737 |
| hCV8717873 | rs1613662 | hCV8718961 | rs1654451 | 0.51 | 0.291390182 | 0.8233 |
| hCV8717873 | rs1613662 | hCV8718968 | rs1671176 | 0.51 | 0.291390182 | 0.4332 |
| hCV8717873 | rs1613662 | hCV8718972 | rs1654447 | 0.51 | 0.291390182 | 0.8825 |
| hCV8717873 | rs1613662 | hCV9490926 | rs1654419 | 0.51 | 0.291390182 | 0.8188 |
| hCV8717873 | rs1613662 | hDV91225183 | rs1671171 | 0.51 | 0.291390182 | 0.4652 |
| hCV8718961 | rs1654451 | hCV11977629 | rs1654459 | 0.51 | 0.573058702 | 1 |
| hCV8718961 | rs1654451 | hCV1376265 | rs1671152 | 0.51 | 0.573058702 | 0.7073 |
| hCV8718961 | rs1654451 | hCV1376266 | rs1654413 | 0.51 | 0.573058702 | 0.7211 |
| hCV8718961 | rs1654451 | hCV1376342 | rs1654416 | 0.51 | 0.573058702 | 0.5824 |
| hCV8718961 | rs1654451 | hCV1376359 | rs2886412 | 0.51 | 0.573058702 | 0.7389 |
| hCV8718961 | rs1654451 | hCV16044361 | rs2569513 | 0.51 | 0.573058702 | 0.9121 |
| hCV8718961 | rs1654451 | hCV26895257 | rs2886415 | 0.51 | 0.573058702 | 0.8105 |
| hCV8718961 | rs1654451 | hCV29271569 | rs1626971 | 0.51 | 0.573058702 | 1 |
| hCV8718961 | rs1654451 | hCV31722831 | rs11671922 | 0.51 | 0.573058702 | 0.7314 |
| hCV8718961 | rs1654451 | hCV31722832 | rs11084381 | 0.51 | 0.573058702 | 0.6692 |
| hCV8718961 | rs1654451 | hCV31722834 | rs11084382 | 0.51 | 0.573058702 | 0.584 |
| hCV8718961 | rs1654451 | hCV31722835 | rs11668169 | 0.51 | 0.573058702 | 0.6692 |
| hCV8718961 | rs1654451 | hCV31722836 | rs11672026 | 0.51 | 0.573058702 | 0.7025 |
| hCV8718961 | rs1654451 | hCV7841075 | rs1671196 | 0.51 | 0.573058702 | 0.6692 |
| hCV8718961 | rs1654451 | hCV8703249 | rs1654444 | 0.51 | 0.573058702 | 0.9398 |
| hCV8718961 | rs1654451 | hCV8717752 | rs1671217 | 0.51 | 0.573058702 | 1 |
| hCV8718961 | rs1654451 | hCV8717761 | rs1654439 | 0.51 | 0.573058702 | 0.8855 |
| hCV8718961 | rs1654451 | hCV8717793 | rs1654433 | 0.51 | 0.573058702 | 0.9121 |
| hCV8718961 | rs1654451 | hCV8717794 | rs1654432 | 0.51 | 0.573058702 | 0.9121 |
| hCV8718961 | rs1654451 | hCV8717845 | rs892090 | 0.51 | 0.573058702 | 0.8233 |
| hCV8718961 | rs1654451 | hCV8717846 | rs892089 | 0.51 | 0.573058702 | 0.7314 |
| hCV8718961 | rs1654451 | hCV8717873 | rs1613662 | 0.51 | 0.573058702 | 0.8233 |
| hCV8718961 | rs1654451 | hCV8717881 | rs1654420 | 0.51 | 0.573058702 | 0.6692 |
| hCV8718961 | rs1654451 | hCV8717893 | rs1671192 | 0.51 | 0.573058702 | 0.756 |
| hCV8718961 | rs1654451 | hCV8718972 | rs1654447 | 0.51 | 0.573058702 | 0.94 |
| hCV8718961 | rs1654451 | hCV9490926 | rs1654419 | 0.51 | 0.573058702 | 0.6692 |
| hCV8911768 | rs941988 | hCV11342529 | rs1951627 | 0.51 | 0.228649809 | 0.3108 |
| hCV8911768 | rs941988 | hCV11975630 | rs2065170 | 0.51 | 0.228649809 | 1 |
| hCV8911768 | rs941988 | hCV15864094 | rs2068871 | 0.51 | 0.228649809 | 0.9425 |
| hCV8911768 | rs941988 | hCV15956059 | rs2227592 | 0.51 | 0.228649809 | 1 |
| hCV8911768 | rs941988 | hCV16135173 | rs2146372 | 0.51 | 0.228649809 | 1 |
| hCV8911768 | rs941988 | hCV16180170 | rs2227589 | 0.51 | 0.228649809 | 1 |
| hCV8911768 | rs941988 | hCV16290208 | rs2759328 | 0.51 | 0.228649809 | 1 |
| hCV8911768 | rs941988 | hCV1681325 | rs898657 | 0.51 | 0.228649809 | 0.288 |
| hCV8911768 | rs941988 | hCV1681328 | rs10912647 | 0.51 | 0.228649809 | 0.2457 |
| hCV8911768 | rs941988 | hCV25600635 | rs7539322 | 0.51 | 0.228649809 | 0.8856 |
| hCV8911768 | rs941988 | hCV25932979 | rs16846809 | 0.51 | 0.228649809 | 0.5549 |
| hCV8911768 | rs941988 | hCV27483572 | rs3791022 | 0.51 | 0.228649809 | 1 |
| hCV8911768 | rs941988 | hCV28998001 | rs6425251 | 0.51 | 0.228649809 | 0.2457 |
| hCV8911768 | rs941988 | hCV29517287 | rs2901747 | 0.51 | 0.228649809 | 0.2436 |
| hCV8911768 | rs941988 | hCV29989899 | rs6685043 | 0.51 | 0.228649809 | 0.6095 |
| hCV8911768 | rs941988 | hCV30205817 | rs10489254 | 0.51 | 0.228649809 | 0.5549 |
| hCV8911768 | rs941988 | hCV30404194 | rs6691053 | 0.51 | 0.228649809 | 0.3572 |
| hCV8911768 | rs941988 | hCV30472885 | rs7520441 | 0.51 | 0.228649809 | 0.315 |
| hCV8911768 | rs941988 | hCV30804119 | rs10912651 | 0.51 | 0.228649809 | 0.2376 |
| hCV8911768 | rs941988 | hCV30804135 | rs12078293 | 0.51 | 0.228649809 | 0.2457 |
| hCV8911768 | rs941988 | hCV30804139 | rs12089930 | 0.51 | 0.228649809 | 0.245 |
| hCV8911768 | rs941988 | hCV8911729 | rs941987 | 0.51 | 0.228649809 | 0.8292 |
| hCV8911768 | rs941988 | hCV9575253 | rs1031751 | 0.51 | 0.228649809 | 0.3146 |
| hCV8911768 | rs941988 | hCV9575263 | rs898658 | 0.51 | 0.228649809 | 0.2457 |
| hCV8911768 | rs941988 | hDV70683090 | rs16846433 | 0.51 | 0.228649809 | 0.9425 |
| hCV8911768 | rs941988 | hDV70683162 | rs16846526 | 0.51 | 0.228649809 | 1 |
| hCV8911768 | rs941988 | hDV70683177 | rs16846546 | 0.51 | 0.228649809 | 1 |
| hCV8911768 | rs941988 | hDV70683187 | rs16846561 | 0.51 | 0.228649809 | 1 |
| hCV8911768 | rs941988 | hDV70683212 | rs16846593 | 0.51 | 0.228649809 | 0.5549 |
| hCV8911768 | rs941988 | hDV70683382 | rs16846815 | 0.51 | 0.228649809 | 0.5078 |
| hCV8911768 | rs941988 | hDV70934851 | rs17301125 | 0.51 | 0.228649809 | 0.2534 |
| hCV8919444 | rs4524 | hCV11341772 | rs4589164 | 0.51 | 0.098333329 | 0.1285 |
| hCV8919444 | rs4524 | hCV11341879 | rs7527703 | 0.51 | 0.098333329 | 0.1112 |
| hCV8919444 | rs4524 | hCV11341886 | rs7539415 | 0.51 | 0.098333329 | 0.1052 |
| hCV8919444 | rs4524 | hCV11341964 | rs12124049 | 0.51 | 0.098333329 | 0.1062 |
| hCV8919444 | rs4524 | hCV11342057 | rs10919186 | 0.51 | 0.098333329 | 0.7473 |
| hCV8919444 | rs4524 | hCV11975196 | rs2040444 | 0.51 | 0.098333329 | 0.358 |
| hCV8919444 | rs4524 | hCV1264276 | rs17345170 | 0.51 | 0.098333329 | 0.1214 |
| hCV8919444 | rs4524 | hCV15802102 | rs2420369 | 0.51 | 0.098333329 | 0.3671 |
| hCV8919444 | rs4524 | hCV15847759 | rs2187952 | 0.51 | 0.098333329 | 1 |
| hCV8919444 | rs4524 | hCV15852051 | rs2213867 | 0.51 | 0.098333329 | 0.8264 |
| hCV8919444 | rs4524 | hCV15955265 | rs2227244 | 0.51 | 0.098333329 | 1 |
| hCV8919444 | rs4524 | hCV16141160 | rs2157597 | 0.51 | 0.098333329 | 0.1285 |
| hCV8919444 | rs4524 | hCV16175730 | rs2239851 | 0.51 | 0.098333329 | 1 |
| hCV8919444 | rs4524 | hCV16175731 | rs2239852 | 0.51 | 0.098333329 | 0.8118 |
| hCV8919444 | rs4524 | hCV16191269 | rs2298909 | 0.51 | 0.098333329 | 0.6586 |
| hCV8919444 | rs4524 | hCV22274637 | rs2301515 | 0.51 | 0.098333329 | 0.7941 |
| hCV8919444 | rs4524 | hCV2229795 | rs723751 | 0.51 | 0.098333329 | 0.4376 |
| hCV8919444 | rs4524 | hCV2456680 | rs6427193 | 0.51 | 0.098333329 | 0.119 |
| hCV8919444 | rs4524 | hCV2456690 | rs6692649 | 0.51 | 0.098333329 | 0.1119 |
| hCV8919444 | rs4524 | hCV2456692 | rs12128350 | 0.51 | 0.098333329 | 0.1136 |
| hCV8919444 | rs4524 | hCV2456693 | rs6672589 | 0.51 | 0.098333329 | 0.1331 |
| hCV8919444 | rs4524 | hCV2456695 | rs10919173 | 0.51 | 0.098333329 | 0.1331 |
| hCV8919444 | rs4524 | hCV2456709 | rs17577184 | 0.51 | 0.098333329 | 0.1068 |
| hCV8919444 | rs4524 | hCV2456710 | rs4656680 | 0.51 | 0.098333329 | 0.1112 |
| hCV8919444 | rs4524 | hCV2456716 | rs12730053 | 0.51 | 0.098333329 | 0.1112 |
| hCV8919444 | rs4524 | hCV2456722 | rs12119479 | 0.51 | 0.098333329 | 0.1112 |
| hCV8919444 | rs4524 | hCV2456729 | rs12143708 | 0.51 | 0.098333329 | 0.1068 |
| hCV8919444 | rs4524 | hCV2456767 | rs2014061 | 0.51 | 0.098333329 | 0.1287 |
| hCV8919444 | rs4524 | hCV2456774 | rs1014965 | 0.51 | 0.098333329 | 0.1025 |
| hCV8919444 | rs4524 | hCV2456776 | rs6669741 | 0.51 | 0.098333329 | 0.1052 |
| hCV8919444 | rs4524 | hCV2456780 | rs7534737 | 0.51 | 0.098333329 | 0.1052 |
| hCV8919444 | rs4524 | hCV2481727 | rs6670407 | 0.51 | 0.098333329 | 0.4176 |
| hCV8919444 | rs4524 | hCV2481728 | rs9332665 | 0.51 | 0.098333329 | 0.7359 |
| hCV8919444 | rs4524 | hCV2481731 | rs9332640 | 0.51 | 0.098333329 | 0.4021 |
| hCV8919444 | rs4524 | hCV2481732 | rs12131397 | 0.51 | 0.098333329 | 0.3978 |
| hCV8919444 | rs4524 | hCV2481733 | rs9332627 | 0.51 | 0.098333329 | 1 |
| hCV8919444 | rs4524 | hCV2481738 | rs4656187 | 0.51 | 0.098333329 | 1 |
| hCV8919444 | rs4524 | hCV2481741 | rs3766109 | 0.51 | 0.098333329 | 1 |
| hCV8919444 | rs4524 | hCV2481744 | rs9332600 | 0.51 | 0.098333329 | 1 |
| hCV8919444 | rs4524 | hCV2481747 | rs9332595 | 0.51 | 0.098333329 | 0.7683 |
| hCV8919444 | rs4524 | hCV2481748 | rs3766110 | 0.51 | 0.098333329 | 0.7683 |
| hCV8919444 | rs4524 | hCV2481750 | rs10800456 | 0.51 | 0.098333329 | 0.6306 |
| hCV8919444 | rs4524 | hCV2520857 | rs12118611 | 0.51 | 0.098333329 | 0.1356 |
| hCV8919444 | rs4524 | hCV2520872 | rs3766090 | 0.51 | 0.098333329 | 0.1059 |
| hCV8919444 | rs4524 | hCV2520887 | rs10442644 | 0.51 | 0.098333329 | 0.1285 |
| hCV8919444 | rs4524 | hCV2521003 | rs2040446 | 0.51 | 0.098333329 | 0.1214 |
| hCV8919444 | rs4524 | hCV25617181 | rs9332620 | 0.51 | 0.098333329 | 1 |
| hCV8919444 | rs4524 | hCV25922120 | rs9332643 | 0.51 | 0.098333329 | 1 |
| hCV8919444 | rs4524 | hCV27242356 | rs12121994 | 0.51 | 0.098333329 | 0.1358 |
| hCV8919444 | rs4524 | hCV27242515 | rs3818844 | 0.51 | 0.098333329 | 0.1009 |
| hCV8919444 | rs4524 | hCV27242533 | rs2138898 | 0.51 | 0.098333329 | 0.1023 |
| hCV8919444 | rs4524 | hCV27242706 | rs7524348 | 0.51 | 0.098333329 | 0.1331 |
| hCV8919444 | rs4524 | hCV27242809 | rs9332630 | 0.51 | 0.098333329 | 0.3659 |
| hCV8919444 | rs4524 | hCV27490260 | rs3820060 | 0.51 | 0.098333329 | 0.8118 |
| hCV8919444 | rs4524 | hCV275164 | rs12140572 | 0.51 | 0.098333329 | 0.1278 |
| hCV8919444 | rs4524 | hCV27928247 | rs4656182 | 0.51 | 0.098333329 | 0.1068 |
| hCV8919444 | rs4524 | hCV27972646 | rs4656677 | 0.51 | 0.098333329 | 0.1112 |
| hCV8919444 | rs4524 | hCV288901 | rs4656671 | 0.51 | 0.098333329 | 0.1112 |
| hCV8919444 | rs4524 | hCV29621699 | rs9332619 | 0.51 | 0.098333329 | 1 |
| hCV8919444 | rs4524 | hCV30018856 | rs6701330 | 0.51 | 0.098333329 | 0.7509 |
| hCV8919444 | rs4524 | hCV30036717 | rs9332653 | 0.51 | 0.098333329 | 0.102 |
| hCV8919444 | rs4524 | hCV30144962 | rs10158595 | 0.51 | 0.098333329 | 0.7453 |
| hCV8919444 | rs4524 | hCV30234691 | rs6662593 | 0.51 | 0.098333329 | 0.9762 |
| hCV8919444 | rs4524 | hCV30433255 | rs9332655 | 0.51 | 0.098333329 | 0.9135 |
| hCV8919444 | rs4524 | hCV30504827 | rs9332608 | 0.51 | 0.098333329 | 0.1235 |
| hCV8919444 | rs4524 | hCV30577322 | rs7516248 | 0.51 | 0.098333329 | 0.1052 |
| hCV8919444 | rs4524 | hCV32141090 | rs12039443 | 0.51 | 0.098333329 | 0.1294 |
| hCV8919444 | rs4524 | hCV32141333 | rs10800446 | 0.51 | 0.098333329 | 0.0998 |
| hCV8919444 | rs4524 | hCV32141337 | rs10919164 | 0.51 | 0.098333329 | 0.115 |
| hCV8919444 | rs4524 | hCV32141359 | rs12022776 | 0.51 | 0.098333329 | 0.0998 |
| hCV8919444 | rs4524 | hCV32141374 | rs10919174 | 0.51 | 0.098333329 | 0.1582 |
| hCV8919444 | rs4524 | hCV32398607 | rs4656658 | 0.51 | 0.098333329 | 0.1214 |
| hCV8919444 | rs4524 | hCV328321 | rs9332667 | 0.51 | 0.098333329 | 1 |
| hCV8919444 | rs4524 | hCV337817 | rs9332586 | 0.51 | 0.098333329 | 0.1619 |
| hCV8919444 | rs4524 | hCV340605 | rs1557572 | 0.51 | 0.098333329 | 0.7416 |
| hCV8919444 | rs4524 | hCV341935 | rs4656685 | 0.51 | 0.098333329 | 0.9762 |
| hCV8919444 | rs4524 | hCV342590 | rs6030 | 0.51 | 0.098333329 | 0.847 |
| hCV8919444 | rs4524 | hCV475606 | rs17349579 | 0.51 | 0.098333329 | 0.105 |
| hCV8919444 | rs4524 | hCV70275 | rs4656687 | 0.51 | 0.098333329 | 0.8118 |
| hCV8919444 | rs4524 | hCV8006091 | rs6656463 | 0.51 | 0.098333329 | 0.1151 |
| hCV8919444 | rs4524 | hCV8697038 | rs961403 | 0.51 | 0.098333329 | 0.1052 |
| hCV8919444 | rs4524 | hCV8697043 | rs1517747 | 0.51 | 0.098333329 | 0.1582 |
| hCV8919444 | rs4524 | hCV8919166 | rs1200139 | 0.51 | 0.098333329 | 0.1536 |
| hCV8919444 | rs4524 | hCV8919279 | rs1200079 | 0.51 | 0.098333329 | 0.2649 |
| hCV8919444 | rs4524 | hCV8919424 | rs974793 | 0.51 | 0.098333329 | 0.9762 |
| hCV8919444 | rs4524 | hCV8919429 | rs970741 | 0.51 | 0.098333329 | 0.9762 |
| hCV8919444 | rs4524 | hCV8919436 | rs916438 | 0.51 | 0.098333329 | 0.8118 |
| hCV8919444 | rs4524 | hCV8919438 | rs1557570 | 0.51 | 0.098333329 | 0.7402 |
| hCV8919444 | rs4524 | hCV8919441 | rs6032 | 0.51 | 0.098333329 | 1 |
| hCV8919444 | rs4524 | hCV8919442 | rs4525 | 0.51 | 0.098333329 | 1 |
| hCV8919444 | rs4524 | hCV8919446 | rs6021 | 0.51 | 0.098333329 | 1 |
| hCV8919444 | rs4524 | hCV8919450 | rs6017 | 0.51 | 0.098333329 | 1 |
| hCV8919444 | rs4524 | hCV8919451 | rs6016 | 0.51 | 0.098333329 | 0.9762 |
| hCV8919444 | rs4524 | hCV9945852 | rs1121789 | 0.51 | 0.098333329 | 1 |
| hCV8919444 | rs4524 | hDV70942075 | rs17349271 | 0.51 | 0.098333329 | 0.1214 |
| hCV8919444 | rs4524 | hDV70942101 | rs17349439 | 0.51 | 0.098333329 | 0.1214 |
| hCV8919444 | rs4524 | hDV77030721 | rs4656664 | 0.51 | 0.098333329 | 0.1224 |
| hCV9102827 | rs3795733 | hCV11258640 | rs6427323 | 0.51 | 0.60489105 | 0.7384 |
| hCV9102827 | rs3795733 | hCV25989540 | rs6682716 | 0.51 | 0.60489105 | 0.6304 |
| hCV9102827 | rs3795733 | hCV26627664 | rs3795727 | 0.51 | 0.60489105 | 0.7186 |
| hCV9102827 | rs3795733 | hCV26627665 | rs2365714 | 0.51 | 0.60489105 | 0.7186 |
| hCV9102827 | rs3795733 | hCV26627679 | rs7536235 | 0.51 | 0.60489105 | 0.7186 |
| hCV9102827 | rs3795733 | hCV31431594 | rs12567958 | 0.51 | 0.60489105 | 0.863 |
| hCV9102827 | rs3795733 | hCV31431603 | rs11264508 | 0.51 | 0.60489105 | 0.7186 |
| hCV9102827 | rs3795733 | hCV31431609 | rs12742817 | 0.51 | 0.60489105 | 0.7186 |
| hCV9102827 | rs3795733 | hCV31431620 | rs12023410 | 0.51 | 0.60489105 | 0.714 |
| hCV9102827 | rs3795733 | hCV31431621 | rs11576266 | 0.51 | 0.60489105 | 1 |
| hCV9102827 | rs3795733 | hCV9102814 | rs879461 | 0.51 | 0.60489105 | 0.8863 |
| hCV9102827 | rs3795733 | hCV9102822 | rs4661052 | 0.51 | 0.60489105 | 0.8863 |
| hCV9102827 | rs3795733 | hCV9102823 | rs12024215 | 0.51 | 0.60489105 | 0.7508 |
| hCV9102827 | rs3795733 | hCV9102829 | rs3795732 | 0.51 | 0.60489105 | 0.8859 |
| hCV9102827 | rs3795733 | hCV9102841 | rs4661188 | 0.51 | 0.60489105 | 0.8863 |
| hCV9102827 | rs3795733 | hCV9102976 | rs10908509 | 0.51 | 0.60489105 | 0.6291 |
| hCV916107 | rs670659 | hCV1874947 | rs494075 | 0.51 | 0.426900693 | 0.4398 |
| hCV916107 | rs670659 | hCV25653735 | rs7520707 | 0.51 | 0.426900693 | 0.5479 |
| hCV916107 | rs670659 | hCV26887401 | rs10802916 | 0.51 | 0.426900693 | 0.4941 |
| hCV916107 | rs670659 | hCV26887441 | rs9786932 | 0.51 | 0.426900693 | 0.5809 |
| hCV916107 | rs670659 | hCV26887461 | rs4660023 | 0.51 | 0.426900693 | 0.7128 |
| hCV916107 | rs670659 | hCV26887463 | rs6680767 | 0.51 | 0.426900693 | 0.7121 |
| hCV916107 | rs670659 | hCV26887464 | rs6669640 | 0.51 | 0.426900693 | 0.6131 |
| hCV916107 | rs670659 | hCV26887465 | rs10802919 | 0.51 | 0.426900693 | 0.5881 |
| hCV916107 | rs670659 | hCV31714435 | rs12143076 | 0.51 | 0.426900693 | 0.463 |
| hCV916107 | rs670659 | hCV31714436 | rs12132113 | 0.51 | 0.426900693 | 0.43 |
| hCV916107 | rs670659 | hCV31714438 | rs12731839 | 0.51 | 0.426900693 | 0.4771 |
| hCV916107 | rs670659 | hCV31714442 | rs12119557 | 0.51 | 0.426900693 | 0.4359 |
| hCV916107 | rs670659 | hCV31714442 | rs12758552 | 0.51 | 0.426900693 | 0.4423 |
| hCV916107 | rs670659 | hCV31714443 | rs12758552 | 0.51 | 0.426900693 | 0.4423 |
| hCV916107 | rs670659 | hCV31714447 | rs10926387 | 0.51 | 0.426900693 | 0.5544 |
| hCV916107 | rs670659 | hCV31714470 | rs10926390 | 0.51 | 0.426900693 | 0.4745 |
| hCV916107 | rs670659 | hCV31714471 | rs10926391 | 0.51 | 0.426900693 | 0.4562 |
| hCV916107 | rs670659 | hCV916106 | rs575226 | 0.51 | 0.426900693 | 1 |

TABLE 4
Table 4. Association of statin with VT in 27 SNP genotype subgroups in MEGA

| | | | | | | | statin | | statin | | statin | | statin | | p(int) | Comparison for |
|---|---|---|---|---|---|---|---|---|---|---|---|---|---|---|---|---|
| | | | | | | | users, | | nonuser, | | users, | | nonusers, | | statin* | p(int) |
| hCV # | Gene Symbol (SNP rs #) | Risk Allele | Subgroup | OR (95% CI) | | P | cases | | cases | | controls | | controls | | SNP | statin*SNP |
| hCV11286902 | LOC400499 (rs12932948) | G | GG | 0.34 | (0.19-0.62) | 4E−04 | 14 | (0.11) | 641 | (0.19) | 54 | (0.22) | 793 | (0.2) | 0.010 | GG vs. AA |
| | | | GA | 0.6 | (0.43-0.82) | 0.001 | 62 | (0.5) | 1668 | (0.48) | 124 | (0.5) | 1907 | (0.47) | 0.168 | GA vs. AA |
| | | | AA | 0.78 | (0.53-1.15) | 0.208 | 47 | (0.38) | 1142 | (0.33) | 69 | (0.28) | 1352 | (0.33) | ref | |
| | | | GA + GG | 0.52 | (0.4-0.69) | 5.E−06 | | | | | | | | | 0.044 | GA + GG vs. AA |
| | | | GA + AA | 0.66 | (0.52-0.85) | 9E−04 | | | | | | | | | 0.029 | GG vs. GA + AA |
| hCV11786258 | KLKB1 (rs4253303) | A | AA | 0.35 | (0.19-0.64) | 7E−04 | 15 | (0.12) | 700 | (0.2) | 41 | (0.16) | 642 | (0.15) | 0.035 | AA vs. GG |
| | | | AG | 0.57 | (0.42-0.79) | 6E−04 | 61 | (0.49) | 1742 | (0.49) | 122 | (0.47) | 2007 | (0.48) | 0.384 | AG vs. GG |
| | | | GG | 0.73 | (0.51-1.06) | 0.095 | 48 | (0.39) | 1114 | (0.31) | 94 | (0.37) | 1552 | (0.37) | ref | |
| | | | AG + AA | 0.51 | (0.39-0.68) | 3.E−06 | | | | | | | | | 0.139 | AG + AA vs. GG |
| | | | AG + GG | 0.63 | (0.5-0.81) | 2E−04 | | | | | | | | | 0.056 | AA vs. AG + GG |
| hCV12066124 | F11 (rs2036914) | C | CC | 0.38 | (0.24-0.6) | 3.E−05 | 27 | (0.22) | 1245 | (0.35) | 68 | (0.26) | 1138 | (0.27) | 0.136 | CC vs. TT |
| | | | CT | 0.66 | (0.49-0.9) | 0.008 | 72 | (0.59) | 1679 | (0.47) | 130 | (0.5) | 2066 | (0.49) | 0.662 | CT vs. TT |
| | | | TT | 0.64 | (0.39-1.05) | 0.077 | 23 | (0.19) | 623 | (0.18) | 61 | (0.24) | 994 | (0.24) | ref | |
| | | | CT + CC | 0.55 | (0.43-0.71) | 3.E−06 | | | | | | | | | 0.740 | CT + CC vs. TT |
| | | | CT + TT | 0.66 | (0.51-0.85) | 0.001 | | | | | | | | | 0.022 | CC vs. CT + TT |
| hCV12092542 | CASP5 (rs507879) | T | TT | 0.75 | (0.49-1.15) | 0.189 | 39 | (0.33) | 1025 | (0.3) | 54 | (0.26) | 1083 | (0.31) | 0.602 | TT vs. CC |
| | | | TC | 0.47 | (0.34-0.66) | 1.E−05 | 52 | (0.44) | 1704 | (0.51) | 116 | (0.57) | 1742 | (0.49) | 0.027 | TC vs. CC |
| | | | CC | 0.94 | (0.56-1.58) | 0.815 | 28 | (0.24) | 638 | (0.19) | 35 | (0.17) | 725 | (0.2) | ref | |
| | | | TC + TT | 0.56 | (0.43-0.73) | 2.E−05 | | | | | | | | | 0.089 | TC + TT vs. CC |
| | | | TC + CC | 0.57 | (0.43-0.76) | 1E−04 | | | | | | | | | 0.225 | TT vs. TC + CC |
| hCV15968043 | CYP4V2 (rs2292423) | A | AA | 0.33 | (0.18-0.61) | 3E−04 | 15 | (0.12) | 739 | (0.21) | 44 | (0.17) | 693 | (0.17) | 0.040 | AA vs. TT |
| | | | AT | 0.61 | (0.45-0.84) | 0.002 | 64 | (0.53) | 1755 | (0.5) | 122 | (0.48) | 2021 | (0.48) | 0.704 | AT vs. TT |
| | | | TT | 0.67 | (0.46-0.98) | 0.038 | 42 | (0.35) | 1021 | (0.29) | 90 | (0.35) | 1456 | (0.35) | ref | |
| | | | AT + AA | 0.53 | (0.4-0.7) | 8.E−06 | | | | | | | | | 0.291 | AT + AA vs. TT |
| | | | AT + TT | 0.63 | (0.5-0.81) | 2E−04 | | | | | | | | | 0.038 | AA vs. AT + TT |
| hCV16171263 | PRLR (rs16871473) | G | GA | 0.2 | (0.06-0.68) | 0.01 | 3 | (0.02) | 207 | (0.06) | 20 | (0.08) | 231 | (0.06) | 0.043 | GA vs. AA |
| | | | AA | 0.61 | (0.49-0.77) | 2.E−05 | 122 | (0.98) | 3335 | (0.94) | 238 | (0.92) | 3951 | (0.94) | ref | |
| | | | GA + GG | 0.2 | (0.06-0.68) | 0.01 | | | | | | | | | 0.041 | GA + GG vs. AA |
| | | | GA + AA | 0.58 | (0.47-0.73) | 2.E−06 | | | | | | | | | n/a | |
| hCV1859855 | GOLGA3 (rs2291260) | C | CC | 0.16 | (0.04-0.56) | 0.004 | 3 | (0.02) | 232 | (0.07) | 14 | (0.05) | 175 | (0.04) | 0.049 | CC vs. TT |
| | | | CT | 0.6 | (0.42-0.86) | 0.005 | 48 | (0.39) | 1207 | (0.34) | 96 | (0.37) | 1453 | (0.35) | 0.899 | CT vs. TT |
| | | | TT | 0.6 | (0.45-0.81) | 8E−04 | 71 | (0.58) | 2088 | (0.59) | 147 | (0.57) | 2522 | (0.61) | ref | |
| | | | CT + CC | 0.52 | (0.37-0.73) | 2E−04 | | | | | | | | | 0.631 | CT + CC vs. TT |
| | | | CT + TT | 0.6 | (0.48-0.76) | 1.E−05 | | | | | | | | | 0.045 | CC vs. CT + TT |
| hCV1948599 | CSMD2 (rs504527) | A | AA | 0.51 | (0.31-0.84) | 0.008 | 24 | (0.2) | 765 | (0.22) | 56 | (0.22) | 945 | (0.22) | 0.198 | AA vs. CC |
| | | | AC | 0.49 | (0.35-0.68) | 2.E−05 | 53 | (0.43) | 1718 | (0.49) | 137 | (0.53) | 2113 | (0.5) | 0.044 | AC vs. CC |
| | | | CC | 0.86 | (0.58-1.27) | 0.44 | 45 | (0.37) | 1005 | (0.29) | 64 | (0.25) | 1144 | (0.27) | ref | |
| | | | AC + AA | 0.49 | (0.38-0.65) | 4.E−07 | | | | | | | | | 0.044 | AC + AA vs. CC |
| | | | AC + CC | 0.61 | (0.47-0.78) | 1.E−04 | | | | | | | | | 0.740 | AA vs. AC + CC |
| hCV1952126 | (rs7223784) | A | AA | 0.54 | (0.4-0.74) | 9.E−05 | 64 | (0.52) | 1976 | (0.56) | 138 | (0.53) | 2258 | (0.54) | 0.019 | AA vs. CC |
| | | | AC | 0.52 | (0.36-0.75) | 5E−04 | 43 | (0.35) | 1343 | (0.38) | 101 | (0.39) | 1598 | (0.38) | 0.018 | AC vs. CC |
| | | | CC | 1.21 | (0.61-2.42) | 0.584 | 17 | (0.14) | 236 | (0.07) | 19 | (0.07) | 338 | (0.08) | ref | |
| | | | AC + AA | 0.53 | (0.42-0.67) | 2.E−07 | | | | | | | | | 0.014 | AC + AA vs. CC |
| | | | AC + CC | 0.62 | (0.45-0.85) | 0.003 | | | | | | | | | 0.507 | AA vs. AC + CC |
| hCV22272267 | KLKB1 (rs3733402) | A | AA | 0.41 | (0.26-0.65) | 2E−04 | 27 | (0.22) | 1141 | (0.32) | 66 | (0.26) | 1092 | (0.26) | 0.141 | AA vs. GG |
| | | | AG | 0.67 | (0.5-0.91) | 0.01 | 70 | (0.56) | 1723 | (0.49) | 126 | (0.49) | 2112 | (0.5) | 0.793 | AG vs. GG |
| | | | GG | 0.67 | (0.42-1.06) | 0.085 | 28 | (0.22) | 680 | (0.19) | 64 | (0.25) | 985 | (0.24) | ref | |
| | | | AG + AA | 0.57 | (0.44-0.74) | 2.E−05 | | | | | | | | | 0.665 | AG + AA vs. GG |
| | | | AG + GG | 0.67 | (0.52-0.86) | 0.002 | | | | | | | | | 0.045 | AA vs. AG + GG |
| hCV2434510 | RNASE7 (rs1243469) | C | CC | 0.8 | (0.07-9.85) | 0.863 | 1 | (0.01) | 46 | (0.01) | 2 | (0.01) | 44 | (0.01) | 0.804 | CC vs. TT |
| | | | CT | 0.35 | (0.2-0.61) | 2E−04 | 17 | (0.14) | 699 | (0.2) | 55 | (0.22) | 797 | (0.19) | 0.047 | CT vs. TT |
| | | | TT | 0.66 | (0.52-0.84) | 9E−04 | 106 | (0.85) | 2774 | (0.79) | 196 | (0.77) | 3324 | (0.8) | ref | |
| | | | CT + CC | 0.36 | (0.21-0.62) | 3E−04 | | | | | | | | | 0.046 | CT + CC vs. TT |
| | | | CT + TT | 0.59 | (0.47-0.74) | 4.E−06 | | | | | | | | | 0.872 | CC vs. CT + TT |
| hCV25610857 | (rs8176693) | T | TT | 1.61 | (0.13-19.25) | 0.709 | 2 | (0.02) | 31 | (0.01) | 1 | (0) | 28 | (0.01) | 0.307 | TT vs. CC |
| | | | TC | 0.92 | (0.55-1.54) | 0.755 | 31 | (0.25) | 604 | (0.17) | 34 | (0.13) | 546 | (0.13) | 0.081 | TC vs. CC |
| | | | CC | 0.5 | (0.39-0.64) | 9.E−08 | 89 | (0.73) | 2886 | (0.82) | 224 | (0.86) | 3629 | (0.86) | ref | |
| | | | TC + TT | 0.94 | (0.57-1.55) | 0.822 | | | | | | | | | 0.058 | TC + TT vs. CC |
| | | | TC + CC | 0.57 | (0.45-0.71) | 8.E−07 | | | | | | | | | 0.349 | TT vs. TC + CC |
| hCV25631989 | ATF6 (rs1135983) | T | TT | 0.98 | (0.07-12.9) | 0.985 | 1 | (0.01) | 23 | (0.01) | 2 | (0.01) | 37 | (0.01) | 0.659 | TT vs. CC |
| | | | TC | 1.09 | (0.66-1.8) | 0.725 | 32 | (0.26) | 505 | (0.14) | 37 | (0.14) | 604 | (0.14) | 0.007 | TC vs. CC |
| | | | CC | 0.49 | (0.38-0.63) | 5.E−08 | 88 | (0.73) | 2963 | (0.85) | 218 | (0.85) | 3552 | (0.85) | ref | |
| | | | TC + TT | 1.09 | (0.67-1.78) | 0.723 | | | | | | | | | 0.006 | TC + TT vs. CC |
| | | | TC + CC | 0.58 | (0.46-0.72) | 2.E−06 | | | | | | | | | 0.749 | TT vs. TC + CC |
| hCV26175114 | TUBA4A (rs3731892) | G | GG | 1.19 | (0.18-7.89) | 0.854 | 3 | (0.02) | 83 | (0.02) | 2 | (0.01) | 73 | (0.02) | 0.414 | GG vs. AA |
| | | | GA | 0.28 | (0.14-0.57) | 4E−04 | 10 | (0.08) | 638 | (0.18) | 44 | (0.17) | 749 | (0.18) | 0.024 | GA vs. AA |
| | | | AA | 0.62 | (0.49-0.79) | 1E−04 | 109 | (0.89) | 2785 | (0.79) | 210 | (0.82) | 3336 | (0.8) | ref | |
| | | | GA + GG | 0.34 | (0.18-0.64) | 9E−04 | | | | | | | | | 0.054 | GA + GG vs. AA |
| | | | GA + AA | 0.57 | (0.45-0.71) | 9.E−07 | | | | | | | | | 0.351 | GG vs. GA + AA |
| hCV27474984 | PIK3R1 (rs3756668) | A | AA | 0.64 | (0.39-1.05) | 0.079 | 26 | (0.21) | 773 | (0.22) | 50 | (0.2) | 876 | (0.21) | 0.134 | AA vs. GG |
| | | | AG | 0.41 | (0.3-0.57) | 9.E−08 | 54 | (0.44) | 1761 | (0.5) | 144 | (0.57) | 1977 | (0.47) | 0.002 | AG vs. GG |
| | | | GG | 0.98 | (0.66-1.48) | 0.94 | 43 | (0.35) | 985 | (0.28) | 60 | (0.24) | 1310 | (0.31) | ref | |
| | | | AG + AA | 0.47 | (0.36-0.62) | 4.E−08 | | | | | | | | | 0.003 | AG + AA vs. GG |
| | | | AG + GG | 0.57 | (0.44-0.73) | 1.E−05 | | | | | | | | | 0.896 | AA vs. AG + GG |
| hCV27502514 | KLF3 (rs3796533) | A | AA | 2.69 | (0.78-9.27) | 0.118 | 9 | (0.07) | 97 | (0.03) | 4 | (0.02) | 109 | (0.03) | 0.011 | AA vs. GG |
| | | | AG | 0.57 | (0.37-0.87) | 0.008 | 36 | (0.29) | 1005 | (0.28) | 69 | (0.27) | 1155 | (0.28) | 0.502 | AG vs. GG |
| | | | GG | 0.53 | (0.4-0.7) | 5.E−06 | 79 | (0.64) | 2450 | (0.69) | 185 | (0.72) | 2910 | (0.7) | ref | |
| | | | AG + AA | 0.68 | (0.46-1) | 0.048 | | | | | | | | | 0.162 | AG + AA vs. GG |
| | | | AG + GG | 0.54 | (0.43-0.68) | 1.E−07 | | | | | | | | | 0.014 | AA vs. AG + GG |
| hCV3054799 | KIF6 (rs20455) | G | GG | 0.52 | (0.29-0.95) | 0.032 | 17 | (0.14) | 515 | (0.14) | 37 | (0.14) | 587 | (0.14) | 0.408 | GG vs. AA |
| | | | GA | 0.83 | (0.6-1.15) | 0.261 | 66 | (0.53) | 1581 | (0.44) | 96 | (0.37) | 1901 | (0.45) | 0.003 | GA vs. AA |
| | | | AA | 0.41 | (0.28-0.58) | 1.E−06 | 42 | (0.34) | 1462 | (0.41) | 125 | (0.48) | 1710 | (0.41) | ref | |
| | | | GA + GG | 0.74 | (0.56-0.99) | 0.041 | | | | | | | | | 0.006 | GA + GG vs. AA |
| | | | GA + AA | 0.59 | (0.47-0.75) | 2.E−05 | | | | | | | | | 0.763 | GG vs. GA + AA |
| hCV3054805 | KIF6 (rs2894424) | G | GG | 0.57 | (0.34-0.96) | 0.035 | 23 | (0.19) | 666 | (0.19) | 46 | (0.18) | 741 | (0.18) | 0.181 | GG vs. CC |
| | | | GC | 0.78 | (0.57-1.08) | 0.134 | 66 | (0.55) | 1621 | (0.46) | 104 | (0.41) | 2019 | (0.48) | 0.003 | GC vs. CC |
| | | | CC | 0.38 | (0.25-0.57) | 3.E−06 | 32 | (0.26) | 1204 | (0.34) | 106 | (0.41) | 1431 | (0.34) | ref | |
| | | | GC + GG | 0.72 | (0.55-0.95) | 0.018 | | | | | | | | | 0.005 | GC + GG vs. CC |
| | | | GC + CC | 0.58 | (0.45-0.74) | 2.E−05 | | | | | | | | | 0.960 | GG vs. GC + CC |
| hCV3054808 | KIF6 (rs9462535) | A | AA | 0.49 | (0.28-0.87) | 0.015 | 18 | (0.15) | 584 | (0.17) | 42 | (0.16) | 675 | (0.16) | 0.580 | AA vs. CC |
| | | | AC | 0.8 | (0.57-1.1) | 0.169 | 64 | (0.52) | 1598 | (0.46) | 99 | (0.39) | 1957 | (0.47) | 0.009 | AC vs. CC |
| | | | CC | 0.43 | (0.3-0.63) | 1.E−05 | 40 | (0.33) | 1313 | (0.38) | 116 | (0.45) | 1565 | (0.37) | ref | |
| | | | AC + AA | 0.71 | (0.53-0.94) | 0.016 | | | | | | | | | 0.024 | AC + AA vs. CC |
| | | | AC + CC | 0.6 | (0.47-0.77) | 4.E−05 | | | | | | | | | 0.612 | AA vs. AC + CC |
| hCV3054813 | KIF6 (rs9471077) | G | GG | 0.48 | (0.28-0.84) | 0.011 | 19 | (0.16) | 593 | (0.17) | 44 | (0.17) | 663 | (0.16) | 0.561 | GG vs. AA |
| | | | GA | 0.82 | (0.6-1.14) | 0.246 | 65 | (0.53) | 1606 | (0.46) | 98 | (0.38) | 1977 | (0.47) | 0.005 | GA vs. AA |
| | | | AA | 0.41 | (0.28-0.6) | 5.E−06 | 38 | (0.31) | 1294 | (0.37) | 115 | (0.45) | 1555 | (0.37) | ref | |
| | | | GA + GG | 0.72 | (0.54-0.95) | 0.021 | | | | | | | | | 0.015 | GA + GG vs. AA |
| | | | GA + AA | 0.6 | (0.47-0.77) | 5.E−05 | | | | | | | | | 0.531 | GG vs. GA + AA |
| hCV3054822 | (rs11751357) | A | AA | 0.44 | (0.18-1.08) | 0.074 | 7 | (0.06) | 270 | (0.08) | 17 | (0.07) | 298 | (0.07) | 0.819 | AA vs. TT |
| | | | AT | 0.9 | (0.65-1.26) | 0.542 | 64 | (0.52) | 1362 | (0.39) | 89 | (0.35) | 1646 | (0.39) | 0.002 | AT vs. TT |
| | | | TT | 0.42 | (0.3-0.58) | 2.E−07 | 51 | (0.42) | 1852 | (0.53) | 151 | (0.59) | 2248 | (0.54) | ref | |
| | | | AT + AA | 0.82 | (0.6-1.11) | 0.2 | | | | | | | | | 0.004 | AT + AA vs. TT |
| | | | AT + TT | 0.6 | (0.48-0.75) | 1.E−05 | | | | | | | | | 0.620 | AA vs. AT + TT |
| hCV3230113 | CYP4V2 (rs1053094) | T | TT | 0.36 | (0.22-0.57) | 2.E−05 | 25 | (0.21) | 1041 | (0.3) | 67 | (0.26) | 990 | (0.24) | 0.060 | TT vs. AA |
| | | | TA | 0.67 | (0.49-0.92) | 0.012 | 64 | (0.53) | 1739 | (0.5) | 119 | (0.46) | 2132 | (0.51) | 0.937 | TA vs. AA |
| | | | AA | 0.69 | (0.45-1.07) | 0.096 | 32 | (0.26) | 732 | (0.21) | 73 | (0.28) | 1078 | (0.26) | ref | |
| | | | TA + TT | 0.54 | (0.42-0.71) | 5.E−06 | | | | | | | | | 0.464 | TA + TT vs. AA |
| | | | TA + AA | 0.67 | (0.52-0.86) | 0.002 | | | | | | | | | 0.024 | TT vs. TA + AA |
| hCV470708 | THBS2 (rs10945408) | T | TT | 0.82 | (0.44-1.51) | 0.52 | 19 | (0.15) | 373 | (0.1) | 27 | (0.11) | 400 | (0.1) | 0.878 | TT vs. GG |
| | | | TG | 0.4 | (0.28-0.58) | 8.E−07 | 42 | (0.34) | 1519 | (0.43) | 124 | (0.48) | 1823 | (0.43) | 0.021 | TG vs. GG |
| | | | GG | 0.73 | (0.53-1.01) | 0.061 | 64 | (0.51) | 1673 | (0.47) | 106 | (0.41) | 1982 | (0.47) | ref | |
| | | | TG + TT | 0.48 | (0.35-0.65) | 3.E−06 | | | | | | | | | 0.068 | TG + TT vs. GG |
| | | | TG + GG | 0.55 | (0.44-0.7) | 1.E−06 | | | | | | | | | 0.338 | TT vs. TG + GG |
| hCV491830 | EPS8L2 (rs3087546) | T | TT | 0.48 | (0.32-0.72) | 4E−04 | 34 | (0.27) | 1167 | (0.33) | 81 | (0.32) | 1302 | (0.31) | 0.036 | TT vs. CC |
| | | | TC | 0.55 | (0.4-0.75) | 2E−04 | 62 | (0.5) | 1700 | (0.48) | 136 | (0.53) | 2020 | (0.48) | 0.070 | TC vs. CC |
| | | | CC | 0.97 | (0.59-1.6) | 0.919 | 29 | (0.23) | 666 | (0.19) | 40 | (0.16) | 846 | (0.2) | ref | |
| | | | TC + TT | 0.52 | (0.41-0.67) | 3.E−07 | | | | | | | | | 0.035 | TC + TT vs. CC |
| | | | TC + CC | 0.64 | (0.49-0.83) | 9E−04 | | | | | | | | | 0.236 | TT vs. TC + CC |
| hCV8241630 | F11 (rs925451) | A | AA | 0.44 | (0.24-0.78) | 0.005 | 18 | (0.15) | 726 | (0.21) | 38 | (0.15) | 627 | (0.15) | 0.070 | AA vs. GG |
| | | | AG | 0.52 | (0.37-0.71) | 6.E−05 | 58 | (0.47) | 1729 | (0.49) | 125 | (0.48) | 1922 | (0.46) | 0.116 | AG vs. GG |
| | | | GG | 0.78 | (0.54-1.12) | 0.175 | 47 | (0.38) | 1079 | (0.31) | 95 | (0.37) | 1650 | (0.39) | ref | |
| | | | AG + AA | 0.49 | (0.37-0.65) | 9.E−07 | | | | | | | | | 0.052 | AG + AA vs. GG |
| | | | AG + GG | 0.61 | (0.48-0.78) | 7.E−05 | | | | | | | | | 0.203 | AA vs. AG + GG |
| hCV8919444 | F5 (rs4524) | T | TT | 0.66 | (0.5-0.87) | 0.004 | 86 | (0.69) | 2176 | (0.61) | 135 | (0.53) | 2295 | (0.55) | 0.110 | TT vs. CC |
| | | | TC | 0.5 | (0.34-0.74) | 5E−04 | 36 | (0.29) | 1189 | (0.34) | 104 | (0.41) | 1589 | (0.38) | 0.272 | TC vs. CC |
| | | | CC | 0.2 | (0.05-0.89) | 0.034 | 2 | (0.02) | 181 | (0.05) | 17 | (0.07) | 304 | (0.07) | ref | |
| | | | TC + TT | 0.6 | (0.48-0.75) | 9.E−06 | | | | | | | | | 0.150 | TC + TT vs. CC |
| | | | TC + CC | 0.46 | (0.32-0.68) | 6.E−05 | | | | | | | | | 0.065 | TT vs. TC + CC |
| hDV68530934 | TF 1208 I/D (hDV68530934) | A | AA | 0.78 | (0.49-1.23) | 0.281 | 33 | (0.26) | 775 | (0.22) | 49 | (0.19) | 876 | (0.21) | 0.036 | AA vs. CC |
| | | | AC | 0.62 | (0.45-0.84) | 0.002 | 66 | (0.53) | 1777 | (0.5) | 127 | (0.49) | 2081 | (0.5) | 0.099 | AC vs. CC |
| | | | CC | 0.39 | (0.25-0.62) | 6.E−05 | 26 | (0.21) | 1004 | (0.28) | 83 | (0.32) | 1242 | (0.3) | ref | |
| | | | AC + AA | 0.66 | (0.51-0.86) | 0.002 | | | | | | | | | 0.046 | AC + AA vs. CC |
| | | | AC + CC | 0.53 | (0.41-0.68) | 1.E−06 | | | | | | | | | 0.153 | AA vs. AC + CC |

27 SNPs (shown above in Table 4) had a p(int) statin*SNP <0.05 (Wald test) in any model.

| | |
|---|---|
| p(int) statin*SNP: | P value <0.05 (Wald test) for statin*SNP interaction term (ModelFormula: VTE~SNP + statin user or nonuser + SNP*statin + age + sex) is specific for the subgroup shown. |
| Endpoint: | VT (including DVT and PE) |
| Parameter: | statin use (statin users or statin nonusers) |

TABLE 5
Table 5. Association of 75 SNPs with VT risk in statin user and statin nonuser subgroups in MEGA (additive P < 0.05).

| | | | | | | | | Allele1 | Allele2 | Geno- | | | Geno- | | | Geno- | | |
|---|---|---|---|---|---|---|---|---|---|---|---|---|---|---|---|---|---|---|
| | marker | | Risk | | | | P- | (allele | (allele | type | Case | Control | type | Case | Control | type | Case | Control |
| | (hCV #) | Gene (SNP rs #) | Allele | parameter | Strata | OR (95% CI) | value | freq) | freq) | 1 | 1 | 1 | 2 | 2 | 2 | 3 | 3 | 3 |
| p(int) | | | | | | | | | | | | | | | | | | |
| statin * | | | | | | | | | | | | | | | | | | |
| SNP | | | | | | | | | | | | | | | | | | |
| (additive) | | | | | | | | | | | | | | | | | | |
| 0.034221851 | hCV8919444 | F5 (rs4524) | T | T_vs_C | statin_0 | 1.26 (1.17-1.36) | 5E−10 | C (0.26) | T (0.74) | CC | 181 | 304 | CT | 1189 | 1589 | TT | 2176 | 2295 |
| | | | | | statin_1 | 1.95 (1.31-2.93) | 0.001 | C (0.27) | T (0.73) | CC | 2 | 17 | CT | 36 | 104 | TT | 86 | 135 |
| 0.04127343 | hCV11786258 | KLKB1 (rs4253303) | A | A_vs_G | statin_0 | 1.23 (1.15-1.31) | 3E−10 | A (0.39) | G (0.61) | AA | 700 | 642 | AG | 1742 | 2007 | GG | 1114 | 1552 |
| | | | | | statin_1 | 0.88 (0.64-1.2) | 0.41 | A (0.4) | G (0.6) | AG | 61 | 122 | GG | 48 | 94 | AA | 15 | 41 |
| 0.046438831 | hCV8241630 | F11 (rs925451) | A | A_vs_G | statin_0 | 1.34 (1.26-1.43) | 5E−19 | A (0.38) | G (0.62) | AA | 726 | 627 | AG | 1729 | 1922 | GG | 1079 | 1650 |
| | | | | | statin_1 | 0.96 (0.7-1.32) | 0.805 | A (0.39) | G (0.61) | AA | 18 | 38 | AG | 58 | 125 | GG | 47 | 95 |
| 0.047140799 | hCV25610857 | (rs8176693) | T | T_vs_C | statin_0 | 1.35 (1.2-1.51) | 3E−07 | C (0.93) | T (0.07) | CC | 2886 | 3629 | CT | 604 | 546 | TT | 31 | 28 |
| | | | | | statin_1 | 2.27 (1.37-3.77) | 0.002 | C (0.93) | T (0.07) | CC | 89 | 224 | CT | 31 | 34 | TT | 2 | 1 |
| 0.048367213 | hCV491830 | EPS8L2 | T | T_vs_C | statin_0 | 1.07 (1-1.14) | 0.046 | C (0.45) | T (0.55) | CC | 666 | 846 | CT | 1700 | 2020 | TT | 1167 | 1302 |
| | | (rs3087546) | | | statin_1 | 0.76 (0.56-1.05) | 0.095 | C (0.42) | T (0.58) | CC | 29 | 40 | CT | 62 | 136 | TT | 34 | 81 |
| 0.06328739 | hCV3230113 | CYP4V2 | T | T_vs_A | statin_0 | 1.25 (1.17-1.33) | 1E−11 | A (0.51) | T (0.49) | AA | 732 | 1078 | AT | 1739 | 2132 | TT | 1041 | 990 |
| | | (rs1053094) | | | statin_1 | 0.93 (0.69-1.26) | 0.641 | A (0.51) | T (0.49) | AA | 32 | 73 | AT | 64 | 119 | TT | 25 | 67 |
| 0.065533427 | hCV15968043 | CYP4V2 | A | A_vs_T | statin_0 | 1.23 (1.16-1.32) | 1E−10 | A (0.41) | T (0.59) | AA | 739 | 693 | AT | 1755 | 2021 | TT | 1021 | 1456 |
| | | (rs2292423) | | | statin_1 | 0.91 (0.66-1.25) | 0.547 | A (0.41) | T (0.59) | AA | 15 | 44 | AT | 64 | 122 | TT | 42 | 90 |
| 0.069827287 | hCV27474984 | PIK3R1 | A | A_vs_G | statin_0 | 1.09 (1.02-1.16) | 0.007 | A (0.45) | G (0.55) | AA | 773 | 876 | AG | 1761 | 1977 | GG | 985 | 1310 |
| | | (rs3756668) | | | statin_1 | 0.81 (0.59-1.11) | 0.195 | A (0.48) | G (0.52) | AA | 26 | 50 | AG | 54 | 144 | GG | 43 | 60 |
| 0.078778864 | hCV11633415 | LOC730144 | T | T_vs_C | statin_0 | 1.17 (1.04-1.32) | 0.011 | C (0.08) | T (0.92) | CC | 25 | 21 | CT | 431 | 616 | TT | 3105 | 3561 |
| | | (rs4262503) | | | statin_1 | 0.69 (0.38-1.22) | 0.201 | C (0.07) | T (0.93) | CT | 23 | 35 | TT | 101 | 224 | 0 | 0 | 0 |
| 0.09822195 | hCV2442143 | ASAH1 | T | T_vs_C | statin_0 | 0.92 (0.87-0.98) | 0.013 | C (0.51) | T (0.49) | CC | 996 | 1106 | CT | 1707 | 2065 | TT | 791 | 1032 |
| | | (rs12544854) | | | statin_1 | 1.2 (0.88-1.64) | 0.242 | C (0.54) | T (0.46) | CC | 32 | 73 | CT | 57 | 134 | TT | 32 | 50 |
| 0.09898811 | hCV12066124 | F11 (rs2036914) | C | C_vs_T | statin_0 | 1.32 (1.24-1.41) | 5E−18 | C (0.52) | T (0.48) | CC | 1245 | 1138 | CT | 1679 | 2066 | TT | 623 | 994 |
| | | | | | statin_1 | 1 (0.73-1.37) | 0.999 | C (0.51) | T (0.49) | CC | 27 | 68 | CT | 72 | 130 | TT | 23 | 61 |
| 0.10233127 | hCV9102827 | GPATCH4 | C | C_vs_T | statin_0 | 1.09 (1.02-1.17) | 0.015 | C (0.26) | T (0.74) | CC | 324 | 309 | CT | 1267 | 1318 | TT | 1857 | 2113 |
| | | (rs3795733) | | | statin_1 | 1.45 (1.04-2.04) | 0.031 | C (0.22) | T (0.78) | CC | 15 | 13 | CT | 43 | 74 | TT | 63 | 138 |
| 0.110882818 | hCV1952126 | (rs7223784) | A | A_vs_C | statin_0 | 1.08 (1.01-1.16) | 0.027 | A (0.73) | C (0.27) | AA | 1976 | 2258 | AC | 1343 | 1598 | CC | 236 | 338 |
| | | | | | statin_1 | 0.83 (0.6-1.14) | 0.248 | A (0.73) | C (0.27) | AA | 64 | 138 | AC | 43 | 101 | CC | 17 | 19 |
| 0.121999557 | hCV27859399 | ABO (rs7853989) | C | C_vs_G | statin_0 | 1.28 (1.16-1.42) | 3E−06 | C (0.09) | G (0.91) | CC | 54 | 37 | CG | 690 | 683 | GG | 2780 | 3480 |
| | | | | | statin_1 | 1.87 (1.17-2.99) | 0.009 | C (0.09) | G (0.91) | CC | 2 | 2 | CG | 34 | 43 | GG | 86 | 213 |
| 0.122240353 | hCV3230038 | F11 (rs2289252) | T | T_vs_C | statin_0 | 1.36 (1.27-1.44) | 1E−20 | C (0.6) | T (0.4) | CC | 958 | 1513 | CT | 1752 | 1986 | TT | 812 | 704 |
| | | | | | statin_1 | 1.05 (0.77-1.43) | 0.757 | C (0.61) | T (0.39) | CC | 43 | 96 | CT | 59 | 123 | TT | 20 | 40 |
| 0.126690785 | hCV22272267 | KLKB1 (rs3733402) | A | A_vs_G | statin_0 | 1.23 (1.16-1.32) | 9E−11 | A (0.51) | G (0.49) | AA | 1141 | 1092 | AG | 1723 | 2112 | GG | 680 | 985 |
| | | | | | statin_1 | 0.97 (0.71-1.31) | 0.822 | A (0.5) | G (0.5) | AA | 27 | 66 | AG | 70 | 126 | GG | 28 | 64 |
| 0.129651976 | hCV27477533 | (rs3756008) | T | T_vs_A | statin_0 | 1.32 (1.24-1.41) | 9E−18 | A (0.61) | T (0.39) | AA | 1029 | 1560 | AT | 1755 | 1960 | TT | 773 | 677 |
| | | | | | statin_1 | 1.03 (0.76-1.41) | 0.84 | A (0.6) | T (0.4) | AA | 43 | 91 | AT | 61 | 126 | TT | 21 | 41 |
| 0.135285269 | hCV16182835 | PTPN21 | G | G_vs_A | statin_0 | 1.11 (1.03-1.18) | 0.003 | A (0.68) | G (0.32) | AA | 1501 | 1930 | AG | 1586 | 1846 | GG | 405 | 422 |
| | | (rs2274736) | | | statin_1 | 0.85 (0.61-1.18) | 0.336 | A (0.63) | G (0.37) | AA | 52 | 102 | AG | 59 | 121 | GG | 11 | 33 |
| 0.142757821 | hCV15793897 | KLKB1 (rs3087505) | G | G_vs_A | statin_0 | 1.26 (1.14-1.4) | 1E−05 | A (0.11) | G (0.89) | AA | 26 | 69 | AG | 590 | 800 | GG | 2943 | 3331 |
| | | | | | statin_1 | 0.91 (0.58-1.41) | 0.674 | A (0.12) | G (0.88) | AA | 2 | 7 | AG | 28 | 46 | GG | 95 | 206 |
| 0.154022293 | hCV916107 | LOC729138 | C | C_vs_T | statin_0 | 1.11 (1.04-1.19) | 0.002 | C (0.64) | T (0.36) | CC | 1540 | 1725 | CT | 1618 | 1904 | TT | 375 | 544 |
| | | (rs670659) | | | statin_1 | 0.87 (0.63-1.21) | 0.417 | C (0.68) | T (0.32) | CC | 50 | 118 | CT | 60 | 111 | TT | 13 | 26 |
| 0.164073369 | hCV27474895 | F11 (rs3756011) | A | A_vs_C | statin_0 | 1.34 (1.26-1.43) | 1E−19 | A (0.4) | C (0.6) | AA | 824 | 711 | AC | 1743 | 1975 | CC | 977 | 1509 |
| | | | | | statin_1 | 1.06 (0.78-1.45) | 0.702 | A (0.4) | C (0.6) | AA | 21 | 40 | AC | 60 | 126 | CC | 42 | 93 |
| 0.179080773 | hCV25474413 | F11 (rs3822057) | C | C_vs_A | statin_0 | 1.3 (1.22-1.39) | 3E−16 | A (0.52) | C (0.48) | AA | 729 | 1140 | AC | 1733 | 2072 | CC | 1078 | 995 |
| | | | | | statin_1 | 1.04 (0.76-1.42) | 0.808 | A (0.52) | C (0.48) | AA | 27 | 69 | AC | 71 | 131 | CC | 25 | 59 |
| 0.213897396 | hCV31523650 | AKT3 (rs12048930) | T | T_vs_C | statin_0 | 1.12 (1.04-1.21) | 0.003 | C (0.8) | T (0.2) | CC | 2198 | 2738 | CT | 1170 | 1277 | TT | 179 | 183 |
| | | | | | statin_1 | 0.88 (0.61-1.28) | 0.516 | C (0.78) | T (0.22) | CC | 79 | 160 | CT | 41 | 83 | TT | 4 | 15 |
| 0.224108979 | hCV16180170 | SERPINC1 | T | T_vs_C | statin_0 | 1.24 (1.12-1.38) | 3E−05 | C (0.91) | T (0.09) | CC | 2791 | 3443 | CT | 697 | 698 | TT | 53 | 40 |
| | | (rs2227589) | | | statin_1 | 1.71 (1.06-2.76) | 0.029 | C (0.92) | T (0.08) | CC | 94 | 219 | CT | 29 | 36 | TT | 2 | 3 |
| 0.229850466 | hCV1859855 | GOLGA3 | C | C_vs_T | statin_0 | 1.12 (1.04-1.21) | 0.004 | C (0.22) | T (0.78) | CC | 232 | 175 | CT | 1207 | 1453 | TT | 2088 | 2522 |
| | | (rs2291260) | | | statin_1 | 0.88 (0.6-1.28) | 0.507 | C (0.24) | T (0.76) | CC | 3 | 14 | CT | 48 | 96 | TT | 71 | 147 |
| 0.278514601 | hCV1376266 | GP6 (rs1654413) | A | A_vs_T | statin_0 | 0.89 (0.83-0.97) | 0.007 | A (0.2) | T (0.8) | AA | 122 | 165 | AT | 1043 | 1351 | TT | 2346 | 2678 |
| | | | | | statin_1 | 1.11 (0.76-1.62) | 0.591 | A (0.19) | T (0.81) | AA | 5 | 11 | AT | 40 | 76 | TT | 77 | 172 |
| 0.285044775 | hCV3230096 | CYP4V2 | T | T_vs_C | statin_0 | 1.22 (1.14-1.3) | 1E−09 | C (0.59) | T (0.41) | CC | 1036 | 1442 | CT | 1750 | 2029 | TT | 774 | 724 |
| | | (rs3817184) | | | statin_1 | 1.03 (0.76-1.39) | 0.864 | C (0.58) | T (0.42) | CC | 40 | 88 | CT | 63 | 124 | TT | 22 | 47 |
| 0.288005598 | hCV16170613 | MET (rs2237712) | G | G_vs_A | statin_0 | 1.2 (1.01-1.43) | 0.037 | A (0.97) | G (0.03) | AA | 3258 | 3822 | AG | 253 | 252 | GG | 7 | 3 |
| | | | | | statin_1 | 0.81 (0.39-1.66) | 0.559 | A (0.95) | G (0.05) | AA | 113 | 222 | AG | 11 | 25 | GG | 0 | 1 |
| 0.288035569 | hCV2532034 | F13B (rs6003) | G | G_vs_A | statin_0 | 1.13 (1.02-1.26) | 0.022 | A (0.91) | G (0.09) | AA | 2803 | 3455 | AG | 598 | 647 | GG | 51 | 51 |
| | | | | | statin_1 | 1.53 (0.88-2.65) | 0.133 | A (0.94) | G (0.06) | AA | 101 | 225 | AG | 19 | 30 | GG | 2 | 1 |
| 0.302357106 | hCV2915511 | OBSL1 (rs627530) | C | C_vs_T | statin_0 | 1.18 (1.01-1.38) | 0.036 | C (0.04) | T (0.96) | CC | 28 | 11 | CT | 253 | 285 | TT | 3263 | 3897 |
| | | | | | statin_1 | 1.84 (0.8-4.25) | 0.15 | C (0.03) | T (0.97) | CT | 11 | 13 | TT | 112 | 244 | 0 | 0 | 0 |
| 0.31836145 | hCV8726802 | F2 (rs1799953) | A | A_vs_G | statin_0 | 2.66 (2.05-3.44) | 1E−13 | A (0.01) | G (0.99) | AA | 1 | 0 | AG | 186 | 86 | GG | 3344 | 4104 |
| | | | | | statin_1 | 1.23 (0.29-5.25) | 0.784 | A (0.01) | G (0.99) | AG | 3 | 5 | GG | 120 | 252 | 0 | 0 | 0 |
| 0.343434006 | hCV2590858 | ADCY9 | C | C_vs_T | statin_0 | 1.08 (1-1.16) | 0.037 | C (0.73) | T (0.27) | CC | 1939 | 2199 | CT | 1319 | 1530 | TT | 217 | 317 |
| | | (rs2230738) | | | statin_1 | 0.91 (0.64-1.29) | 0.592 | C (0.76) | T (0.24) | CC | 69 | 145 | CT | 48 | 91 | TT | 8 | 14 |
| 0.345514722 | hCV2303891 | APOH (rs1801690) | C | C_vs_G | statin_0 | 1.26 (1.08-1.45) | 0.002 | C (0.94) | G (0.06) | CC | 3249 | 3730 | CG | 300 | 456 | GG | 10 | 5 |
| | | | | | statin_1 | 0.89 (0.45-1.78) | 0.743 | C (0.95) | G (0.05) | CC | 112 | 235 | CG | 13 | 22 | GG | 0 | 1 |
| 0.35994798 | hCV8911768 | SERPINC1 | T | T_vs_C | statin_0 | 1.24 (1.12-1.38) | 3E−05 | C (0.91) | T (0.09) | CC | 2769 | 3458 | CT | 696 | 707 | TT | 55 | 42 |
| | | (rs941988) | | | statin_1 | 1.59 (0.97-2.62) | 0.066 | C (0.92) | T (0.08) | CC | 93 | 220 | CT | 28 | 36 | TT | 1 | 3 |
| 0.367055136 | hCV11503470 | (rs1800788) | T | T_vs_C | statin_0 | 1.21 (1.13-1.31) | 4E−07 | C (0.79) | T (0.21) | CC | 2057 | 2674 | CT | 1291 | 1325 | TT | 211 | 205 |
| | | | | | statin_1 | 1.02 (0.72-1.45) | 0.889 | C (0.76) | T (0.24) | CC | 70 | 149 | CT | 46 | 92 | TT | 8 | 17 |
| 0.367159592 | hCV22273419 | GP6 (rs2304167) | C | C_vs_T | statin_0 | 0.89 (0.82-0.96) | 0.004 | C (0.2) | T (0.8) | CC | 121 | 167 | CT | 1048 | 1338 | TT | 2372 | 2671 |
| | | | | | statin_1 | 1.06 (0.73-1.54) | 0.751 | C (0.19) | T (0.81) | CC | 5 | 12 | CT | 40 | 73 | TT | 80 | 169 |
| 0.371584665 | hCV1202883 | MTHFR | G | G_vs_A | statin_0 | 1.08 (1-1.17) | 0.038 | A (0.3) | G (0.7) | AA | 172 | 269 | AG | 1695 | 1988 | GG | 1684 | 1934 |
| | | (rs1801133) | | | statin_1 | 1.28 (0.9-1.82) | 0.177 | A (0.32) | G (0.68) | AA | 5 | 23 | AG | 57 | 117 | GG | 61 | 116 |
| 0.371786352 | hCV1376342 | GP6 (rs1654416) | C | C_vs_T | statin_0 | 0.88 (0.81-0.95) | 0.002 | C (0.2) | T (0.8) | CC | 115 | 159 | CT | 1029 | 1342 | TT | 2386 | 2693 |
| | | | | | statin_1 | 1.05 (0.72-1.51) | 0.809 | C (0.19) | T (0.81) | CC | 5 | 14 | CT | 39 | 71 | TT | 79 | 172 |
| 0.406756226 | hCV11975250 | F5 (rs6025) | T | T_vs_C | statin_0 | 3.42 (2.92-4.01) | 1E−51 | C (0.97) | T (0.03) | CC | 2934 | 3930 | CT | 556 | 207 | TT | 23 | 7 |
| | | | | | statin_1 | 4.78 (2.34-9.77) | 2E−05 | C (0.98) | T (0.02) | CC | 99 | 239 | CT | 22 | 12 | TT | 2 | 0 |
| 0.407763342 | hCV2103346 | DKFZP564J102 | C | C_vs_T | statin_0 | 1.07 (1.01-1.14) | 0.03 | C (0.44) | T (0.56) | CC | 753 | 862 | CT | 1731 | 1988 | TT | 1029 | 1341 |
| | | (rs11733307) | | | statin_1 | 1.22 (0.9-1.65) | 0.201 | C (0.44) | T (0.56) | CC | 28 | 52 | CT | 62 | 122 | TT | 31 | 85 |
| 0.410870664 | hCV15860324 | PROCR | C | C_vs_T | statin_0 | 1.33 (1.16-1.52) | 4E−05 | C (0.05) | T (0.95) | CC | 17 | 13 | CT | 431 | 398 | TT | 3073 | 3789 |
| | | (rs2069946) | | | statin_1 | 1.03 (0.56-1.87) | 0.928 | C (0.06) | T (0.94) | CC | 1 | 2 | CT | 14 | 29 | TT | 107 | 226 |
| 0.412798308 | hCV11503469 | FGG (rs2066854) | A | A_vs_T | statin_0 | 1.37 (1.28-1.47) | 5E−19 | A (0.27) | T (0.73) | AA | 405 | 298 | AT | 1544 | 1623 | TT | 1600 | 2265 |
| | | | | | statin_1 | 1.19 (0.86-1.64) | 0.301 | A (0.3) | T (0.7) | AA | 16 | 21 | AT | 52 | 111 | TT | 57 | 125 |
| 0.423539585 | hCV30562347 | F11 (rs4253418) | G | G_vs_A | statin_0 | 1.28 (1.09-1.51) | 0.003 | A (0.04) | G (0.96) | AA | 7 | 9 | AG | 231 | 349 | GG | 3317 | 3824 |
| | | | | | statin_1 | 0.99 (0.5-1.95) | 0.972 | A (0.04) | G (0.96) | AA | 2 | 2 | AG | 7 | 18 | GG | 114 | 237 |
| 0.435904222 | hCV263841 | NR1I2 (rs1523127) | C | C_vs_A | statin_0 | 1.11 (1.04-1.18) | 0.002 | A (0.62) | C (0.38) | AA | 1263 | 1578 | AC | 1667 | 2003 | CC | 617 | 608 |
| | | | | | statin_1 | 0.97 (0.71-1.33) | 0.85 | A (0.62) | C (0.38) | AA | 46 | 97 | AC | 62 | 121 | CC | 16 | 38 |
| 0.43932399 | hCV596331 | F9 (rs6048) | A | A_vs_G | statin_0 | 1.1 (1.04-1.17) | 0.001 | A (0.7) | G (0.3) | AA | 2171 | 2457 | AG | 766 | 906 | GG | 583 | 813 |
| | | | | | statin_1 | 1.22 (0.93-1.61) | 0.148 | A (0.69) | G (0.31) | AA | 83 | 161 | AG | 21 | 33 | GG | 19 | 62 |
| 0.45280106 | hCV8718961 | RDH13 (rs1654451) | A | A_vs_T | statin_0 | 0.89 (0.81-0.97) | 0.009 | A (0.16) | T (0.84) | AA | 68 | 104 | AT | 866 | 1114 | TT | 2591 | 2986 |
| | | | | | statin_1 | 1.04 (0.69-1.56) | 0.853 | A (0.15) | T (0.85) | AA | 3 | 9 | AT | 33 | 62 | TT | 86 | 188 |
| 0.469253388 | hCV30710896 | F2 (rs3136520) | T | T_vs_C | statin_0 | 1.28 (1.06-1.56) | 0.012 | C (0.98) | T (0.02) | CC | 3315 | 4011 | CT | 198 | 189 | TT | 7 | 4 |
| | | | | | statin_1 | 0.9 (0.37-2.18) | 0.808 | C (0.97) | T (0.03) | CC | 114 | 244 | CT | 7 | 14 | TT | 0 | 1 |
| 0.497858665 | hCV8717873 | GP6 (rs1613662) | A | A_vs_G | statin_0 | 1.17 (1.08-1.27) | 2E−04 | A (0.82) | G (0.18) | AA | 2488 | 2783 | AG | 954 | 1265 | GG | 93 | 136 |
| | | | | | statin_1 | 1.02 (0.69-1.5) | 0.922 | A (0.82) | G (0.18) | AA | 85 | 174 | AG | 34 | 73 | GG | 5 | 10 |
| 0.518388541 | hCV2892877 | FGA (rs6050) | C | C_vs_T | statin_0 | 1.38 (1.26-1.52) | 4E−12 | C (0.24) | T (0.76) | CC | 14 | 18 | CT | 1808 | 1810 | TT | 1485 | 2090 |
| | | | | | statin_1 | 1.19 (0.76-1.85) | 0.447 | C (0.25) | T (0.75) | CC | 1 | 0 | CT | 61 | 121 | TT | 52 | 117 |
| 0.525140093 | hCV2499170 | (rs169713) | C | C_vs_T | statin_0 | 1.1 (1.02-1.19) | 0.015 | C (0.2) | T (0.8) | CC | 175 | 200 | CT | 1185 | 1305 | TT | 2135 | 2694 |
| | | | | | statin_1 | 0.96 (0.64-1.44) | 0.847 | C (0.2) | T (0.8) | CC | 3 | 5 | CT | 41 | 92 | TT | 78 | 160 |
| 0.541874674 | hCV11503414 | FGG (rs2066865) | A | A_vs_G | statin_0 | 1.37 (1.28-1.47) | 4E−19 | A (0.26) | G (0.74) | AA | 396 | 294 | AG | 1535 | 1623 | GG | 1584 | 2266 |
| | | | | | statin_1 | 1.23 (0.88-1.71) | 0.219 | A (0.29) | G (0.71) | AA | 15 | 20 | AG | 52 | 111 | GG | 54 | 126 |
| 0.546620019 | hCV15949414 | XYLB (rs2234628) | G | G_vs_A | statin_0 | 1.34 (1.15-1.56) | 2E−04 | A (0.05) | G (0.95) | AA | 13 | 14 | AG | 257 | 418 | GG | 3266 | 3762 |
| | | | | | statin_1 | 1.07 (0.49-2.36) | 0.862 | A (0.04) | G (0.96) | AG | 10 | 22 | GG | 112 | 237 | 0 | 0 | 0 |
| 0.583697812 | hCV25597241 | AQP2 (rs3782320) | A | A_vs_G | statin_0 | 1.12 (1.01-1.25) | 0.038 | A (0.09) | G (0.91) | AA | 33 | 32 | AG | 607 | 659 | GG | 2877 | 3513 |
| | | | | | statin_1 | 0.96 (0.56-1.66) | 0.895 | A (0.09) | G (0.91) | AA | 0 | 3 | AG | 21 | 40 | GG | 101 | 216 |
| 0.619356604 | hCV16177220 | ODZ1 (rs2266911) | C | C_vs_T | statin_0 | 1.09 (1.02-1.17) | 0.009 | C (0.8) | T (0.2) | CC | 2613 | 2982 | CT | 593 | 737 | TT | 347 | 475 |
| | | | | | statin_1 | 1 (0.72-1.39) | 0.996 | C (0.83) | T (0.17) | CT | 23 | 34 | TT | 10 | 27 | CC | 92 | 195 |
| 0.621640282 | hCV27902808 | CYP4V2 | T | T_vs_C | statin_0 | 0.85 (0.79-0.9) | 9E−07 | C (0.64) | T (0.36) | CC | 1597 | 1711 | CT | 1557 | 1935 | TT | 364 | 555 |
| | | (rs4253236) | | | statin_1 | 0.92 (0.67-1.25) | 0.587 | C (0.61) | T (0.39) | CC | 44 | 100 | CT | 65 | 114 | TT | 13 | 45 |
| 0.652386012 | hCV11541681 | LOC200420 | C | C_vs_G | statin_0 | 1.07 (1.01-1.14) | 0.032 | C (0.37) | G (0.63) | CC | 560 | 583 | CG | 1631 | 1949 | GG | 1351 | 1661 |
| | | (rs2001490) | | | statin_1 | 0.99 (0.72-1.38) | 0.969 | C (0.35) | G (0.65) | CC | 15 | 28 | CG | 57 | 125 | GG | 52 | 104 |
| 0.66407521 | hDV71075942 | (rs8176719) | G | G_vs_T | statin_0 | 1.67 (1.56-1.79) | 6E−51 | G (0.34) | T (0.66) | GG | 669 | 512 | TG | 1896 | 1840 | TT | 951 | 1849 |
| | | | | | statin_1 | 1.81 (1.29-2.54) | 6E−04 | G (0.35) | T (0.65) | GG | 18 | 31 | TG | 80 | 120 | TT | 24 | 108 |
| 0.676672364 | hCV30690780 | AKT3 (rs10737888) | C | C_vs_A | statin_0 | 1.15 (1.07-1.24) | 2E−04 | A (0.77) | C (0.23) | AA | 2011 | 2515 | AC | 1236 | 1466 | CC | 268 | 212 |
| | | | | | statin_1 | 1.07 (0.76-1.51) | 0.702 | A (0.76) | C (0.24) | AA | 70 | 151 | AC | 42 | 91 | CC | 10 | 17 |
| 0.701926538 | hCV1825046 | PROCR | C | C_vs_T | statin_0 | 0.84 (0.78-0.89) | 7E−08 | C (0.41) | T (0.59) | CC | 494 | 706 | CT | 1572 | 2005 | TT | 1457 | 1494 |
| | | (rs2069952) | | | statin_1 | 0.79 (0.57-1.09) | 0.145 | C (0.4) | T (0.6) | CC | 15 | 38 | CT | 53 | 130 | TT | 53 | 91 |
| 0.713175712 | hCV31523608 | AKT3 (rs12744297) | G | G_vs_A | statin_0 | 1.13 (1.06-1.21) | 4E−04 | A (0.67) | G (0.33) | AA | 1482 | 1917 | AG | 1578 | 1823 | GG | 460 | 464 |
| | | | | | statin_1 | 1.2 (0.86-1.66) | 0.287 | A (0.66) | G (0.34) | AA | 45 | 110 | AG | 62 | 123 | GG | 15 | 26 |
| 0.715483519 | hCV15990789 | OTOG (rs2355466) | G | G_vs_A | statin_0 | 1.07 (1-1.14) | 0.045 | A (0.41) | G (0.59) | AA | 544 | 690 | AG | 1643 | 2001 | GG | 1320 | 1478 |
| | | | | | statin_1 | 0.99 (0.72-1.38) | 0.975 | A (0.36) | G (0.64) | AA | 15 | 33 | AG | 58 | 117 | GG | 48 | 101 |
| 0.737326509 | hCV30690777 | AKT3 (rs12045585) | A | A_vs_G | statin_0 | 1.14 (1.04-1.24) | 0.004 | A (0.14) | G (0.86) | AA | 99 | 75 | AG | 911 | 1035 | GG | 2505 | 3085 |
| | | | | | statin_1 | 1.07 (0.71-1.6) | 0.747 | A (0.16) | G (0.84) | AA | 5 | 7 | AG | 32 | 70 | GG | 85 | 180 |
| 0.738278618 | hCV15860433 | (rs2070006) | T | T_vs_C | statin_0 | 1.24 (1.16-1.32) | 1E−10 | C (0.61) | T (0.39) | CC | 1090 | 1550 | CT | 1748 | 1971 | TT | 713 | 669 |
| | | | | | statin_1 | 1.3 (0.96-1.75) | 0.091 | C (0.6) | T (0.4) | CC | 37 | 96 | CT | 60 | 119 | TT | 28 | 43 |
| 0.798652766 | hCV25748719 | NAP5 ( ) | C | C_vs_T | statin_0 | 1.08 (1.01-1.17) | 0.036 | C (0.77) | T (0.23) | CC | 2163 | 2462 | CT | 1206 | 1490 | TT | 169 | 225 |
| | | | | | statin_1 | 1.15 (0.78-1.68) | 0.482 | C (0.77) | T (0.23) | CC | 74 | 152 | CT | 50 | 91 | TT | 1 | 13 |
| 0.804517403 | hCV2986566 | F9 (rs4149755) | A | A_vs_T | statin_0 | 1.15 (1.03-1.28) | 0.015 | A (0.06) | T (0.94) | AA | 113 | 106 | AT | 258 | 268 | TT | 3152 | 3826 |
| | | | | | statin_1 | 1.07 (0.65-1.78) | 0.783 | A (0.06) | T (0.94) | AA | 5 | 9 | AT | 5 | 11 | TT | 111 | 239 |
| 0.808271852 | hCV32291301 | KLKB1 (rs4253302) | A | A_vs_G | statin_0 | 1.2 (1.1-1.31) | 6E−05 | A (0.84) | G (0.16) | AA | 2649 | 2949 | AG | 835 | 1140 | GG | 79 | 114 |
| | | | | | statin_1 | 1.25 (0.83-1.87) | 0.282 | A (0.82) | G (0.18) | AA | 93 | 178 | AG | 28 | 70 | GG | 4 | 11 |
| 0.841280102 | hCV1841973 | (rs1799808) | T | T_vs_C | statin_0 | 0.94 (0.88-1) | 0.049 | C (0.65) | T (0.35) | CC | 1545 | 1756 | CT | 1565 | 1918 | TT | 405 | 525 |
| | | | | | statin_1 | 0.9 (0.67-1.23) | 0.515 | C (0.64) | T (0.36) | CC | 57 | 111 | CT | 48 | 105 | TT | 17 | 40 |
| 0.86593208 | hCV25990131 | CYP4V2 | A | A_vs_C | statin_0 | 1.2 (1.12-1.28) | 2E−07 | A (0.64) | C (0.36) | AA | 1584 | 1665 | AC | 1430 | 1808 | CC | 351 | 527 |
| | | (rs13146272) | | | statin_1 | 1.16 (0.84-1.6) | 0.358 | A (0.62) | C (0.38) | AA | 51 | 97 | AC | 56 | 107 | CC | 13 | 38 |
| 0.87763198 | hCV25620145 | PROCR (rs867186) | G | G_vs_A | statin_0 | 1.18 (1.07-1.29) | 5E−04 | A (0.88) | G (0.12) | AA | 2601 | 3203 | AG | 869 | 917 | GG | 74 | 62 |
| | | | | | statin_1 | 1.14 (0.73-1.77) | 0.565 | A (0.87) | G (0.13) | AA | 91 | 194 | AG | 30 | 61 | GG | 3 | 3 |
| 0.918870113 | hCV1841974 | (rs1799809) | G | G_vs_A | statin_0 | 1.15 (1.08-1.22) | 3E−05 | A (0.57) | G (0.43) | AA | 1007 | 1362 | AG | 1741 | 2046 | GG | 770 | 794 |
| | | | | | statin_1 | 1.17 (0.87-1.57) | 0.298 | A (0.56) | G (0.44) | AA | 38 | 82 | AG | 50 | 122 | GG | 34 | 53 |
| 0.927314636 | hCV233148 | AKT3 (rs1417121) | C | C_vs_G | statin_0 | 1.15 (1.08-1.23) | 6E−05 | C (0.28) | G (0.72) | CC | 378 | 318 | CG | 1434 | 1694 | GG | 1735 | 2171 |
| | | | | | statin_1 | 1.14 (0.82-1.59) | 0.44 | C (0.27) | G (0.73) | CC | 11 | 21 | CG | 52 | 98 | GG | 61 | 138 |
| 0.928029357 | hCV1841983 | PROC (rs5937) | C | C_vs_T | statin_0 | 1.13 (1.06-1.21) | 3E−04 | C (0.34) | T (0.66) | CC | 501 | 504 | CT | 1610 | 1873 | TT | 1392 | 1808 |
| | | | | | statin_1 | 1.12 (0.82-1.52) | 0.484 | C (0.36) | T (0.64) | CC | 22 | 34 | CT | 49 | 117 | TT | 50 | 107 |
| 0.96355332 | hCV30747430 | NR1I2 (rs11712211) | T | T_vs_C | statin_0 | 1.14 (1.06-1.24) | 8E−04 | C (0.82) | T (0.18) | CC | 2251 | 2803 | CT | 1095 | 1253 | TT | 179 | 148 |
| | | | | | statin_1 | 1.15 (0.78-1.69) | 0.484 | C (0.83) | T (0.17) | CC | 80 | 177 | CT | 36 | 74 | TT | 6 | 8 |
| 0.970695776 | hCV1841975 | PROC (rs1799810) | T | T_vs_A | statin_0 | 1.13 (1.06-1.21) | 1E−04 | A (0.57) | T (0.43) | AA | 1036 | 1374 | AT | 1748 | 2035 | TT | 765 | 789 |
| | | | | | statin_1 | 1.13 (0.85-1.52) | 0.403 | A (0.56) | T (0.44) | AA | 40 | 82 | AT | 49 | 122 | TT | 34 | 53 |
| additive Pint | | | | | | | | | | | | | | | | | | |
| statin * SNP | | | | | | | | | | | | | | | | | | |
| 0.002528557 | hCV2211618 | DDT (rs12483950) | G | G_vs_C | statin_0 | 1.08 (1.02-1.15) | 0.015 | C (0.57) | G (0.43) | CC | 1088 | 1358 | CG | 1710 | 2002 | GG | 710 | 750 |
| | | | | | statin_1 | 0.66 (0.48-0.91) | 0.011 | C (0.53) | G (0.47) | CC | 46 | 74 | CG | 66 | 118 | GG | 13 | 58 |

SNPs are ranked above in Table 5 by P(int) statin * SNP from the additive model.

| | |
|---|---|
| p(int) statin * SNP: | P value < 0.05 (Wald test) for statin * SNP interaction term (ModelFormula: VTE~SNP + statin user or nonuser + SNP * statin + age + sex) from an additive model. |
| Endpoint: | VT (including DVT and PE) |
| Strata: | statin_0 (statin nonusers), statin_1 (statin users) |
| Model: | additive |

TABLE 6
Table 6. Association of statin use and VTE in SNP genotype subgroups in MEGA,
and VTE risk of that genotype in statin nonusers in MEGA (last 2 columns)
Model: VTE~statin + age + sex

| | | | | | | | reference | | |
|---|---|---|---|---|---|---|---|---|---|
| | | | | | | | group | statin | statin |
| | Risk | | | OR (95% CI) for | | P(int | for P(int | users, | nonusers, |
| Gene (rs #) | Allele | Strata | model | statin * VTE | P | statin * SNP) | statin * SNP) | cases | cases |
| DDT (rs12483950) | G | GG | | 0.24 (0.13-0.44) | 6E−06 | 0.001202 | GGvs.CC | 13 (0.1) | 710 (0.2) |
| DDT (rs12483950) | G | GC | | 0.67 (0.49-0.92) | 0.013 | 0.494961 | GCvs.CC | 66 (0.53) | 1710 (0.49) |
| DDT (rs12483950) | G | CC | | 0.78 (0.53-1.14) | 0.196 | 0.002529 | | 46 (0.37) | 1088 (0.31) |
| DDT (rs12483950) | G | GC + CC | rec | 0.71 (0.56-0.91) | 0.006 | 0.001199 | GGvs.GC + | 13 | 710 |
| | | | | | | | CC | | |
| DDT (rs12483950) | G | GC + GG | dom | 0.52 (0.4-0.69) | 4E−06 | 0.077571 | GC + | 79 | 2420 |
| | | | | | | | GGvs.CC | | |
| DDT (rs12483950) | G | | add | | | 0.002529 | | | |
| F2RL1 (rs1529505) | T | TT | | 0.47 (0.31-0.73) | 7E−04 | 0.067 | TTvs.CC | 31 (0.25) | 1095 (0.31) |
| F2RL1 (rs1529505) | T | TC | | 0.55 (0.4-0.75) | 2E−04 | 0.163 | TCvs.CC | 62 (0.5) | 1722 (0.49) |
| F2RL1 (rs1529505) | T | CC | | 0.88 (0.55-1.41) | 0.595 | | | 32 (0.26) | 709 (0.2) |
| F2RL1 (rs1529505) | T | TT | rec | 0.63 (0.49-0.82) | 5E−04 | 0.220 | TTvs.TT | 31 | 1095 |
| F2RL1 (rs1529505) | T | TC + TT | dom | 0.52 (0.4-0.67) | 4E−07 | 0.083 | TC + | 93 | 2817 |
| | | | | | | | TTvs.CC | | |
| LOC729672 (rs4334028) | T | TT | | 0.62 (0.31-1.23) | 0.168 | 0.199 | TTvs.CC | 15 (0.12) | 332 (0.09) |
| LOC729672 (rs4334028) | T | TC | | 0.69 (0.5-0.95) | 0.023 | 0.082 | TCvs.CC | 63 (0.51) | 1521 (0.43) |
| LOC729672 (rs4334028) | T | CC | | 0.46 (0.32-0.65) | 1E−05 | | | 46 (0.37) | 1705 (0.48) |
| LOC729672 (rs4334028) | T | TT | rec | 0.57 (0.45-0.72) | 2E−06 | 0.446 | TTvs.TT | 15 | 332 |
| LOC729672 (rs4334028) | T | TC + TT | dom | 0.68 (0.51-0.91) | 0.009 | 0.060 | TC + | 78 | 1853 |
| | | | | | | | TTvs.CC | | |
| ASAH1 (rs12544854) | T | TT | | 0.85 (0.54-1.35) | 0.487 | 0.085 | TTvs.CC | 32 (0.2645) | 791 (0.2264) |
| ASAH1 (rs12544854) | T | TC | | 0.53 (0.38-0.73) | 1E−04 | 0.833 | TCvs.CC | 57 (0.4711) | 1707 (0.4886) |
| ASAH1 (rs12544854) | T | CC | | 0.5 (0.32-0.77) | 0.002 | | | 32 (0.2645) | 996 (0.2851) |
| ASAH1 (rs12544854) | T | TT | rec | 0.52 (0.4-0.67) | 6E−07 | 0.055 | TTvs.TT | 32 | 791 |
| ASAH1 (rs12544854) | T | TC + TT | dom | 0.61 (0.47-0.8) | 3E−04 | 0.404 | TC + | 89 | 2498 |
| | | | | | | | TTvs.CC | | |
| LOC730144 (rs4262503) | T | TC | | 1 (0.58-1.73) | 0.995 | 0.051 | TCvs.TT | 23 (0.19) | 431 (0.12) |
| LOC730144 (rs4262503) | T | TT | | 0.52 (0.41-0.66) | 2E−07 | | | 101 (0.81) | 3105 (0.87) |
| LOC730144 (rs4262503) | T | TT | rec | 0.98 (0.57-1.7) | 0.954 | 0.060 | TCvs.TT | 101 | 3105 |
| LOC730144 (rs4262503) | T | TC + TT | dom | 0.57 (0.46-0.72) | 1E−06 | n/a | | | |

| Model: VTE~statin + age + sex | | | | | | Model: SNP~VTE + age | |
|---|---|---|---|---|---|---|---|
| | | | | statin | statin | | P for |
| | Risk | | | users, | nonusers, | OR (95% CI) for | VTE |
| Gene (rs #) | Allele | Strata | model | controls | controls | VTE risk | risk |
| DDT (rs12483950) | G | GG | | 58 (0.23) | 750 (0.18) | 1.18 (1.03-1.34) | 0.0134 |
| DDT (rs12483950) | G | GC | | 118 (0.47) | 2002 (0.49) | 1.07 (0.96-1.18) | 0.2276 |
| DDT (rs12483950) | G | CC | | 74 (0.3) | 1358 (0.33) | 1.08 (1.02-1.15) | 0.0148 |
| DDT (rs12483950) | G | GC + CC | rec | 58 | 750 | 1.13 (1.01-1.27) | 0.0309 |
| DDT (rs12483950) | G | GC + GG | dom | 176 | 2752 | 1.1 (0.99-1.21) | 0.0633 |
| DDT (rs12483950) | G | | add | | | 1.08 (1.02-1.15) | 0.0148 |
| F2RL1 (rs1529505) | T | TT | | 77 (0.3) | 1248 (0.3) | 1.08 (0.95-1.23) | 0.233 |
| F2RL1 (rs1529505) | T | TC | | 131 (0.51) | 2025 (0.49) | 1.05 (0.93-1.18) | 0.457 |
| F2RL1 (rs1529505) | T | CC | | 48 (0.19) | 872 (0.21) | ref | ref |
| F2RL1 (rs1529505) | T | TT | rec | 77 | 1248 | 1.05 (0.95-1.15) | 0.350 |
| F2RL1 (rs1529505) | T | TC + TT | dom | 208 | 3273 | 1.06 (0.95-1.18) | 0.310 |
| LOC729672 (rs4334028) | T | TT | | 22 (0.08) | 355 (0.08) | 1.11 (0.95-1.31) | 0.193 |
| LOC729672 (rs4334028) | T | TC | | 113 (0.44) | 1824 (0.43) | 0.99 (0.9-1.09) | 0.889 |
| LOC729672 (rs4334028) | T | CC | | 124 (0.48) | 2030 (0.48) | ref | ref |
| LOC729672 (rs4334028) | T | TT | rec | 22 | 355 | 1.12 (0.96-1.31) | 0.164 |
| LOC729672 (rs4334028) | T | TC + TT | dom | 135 | 2179 | 1.01 (0.93-1.11) | 0.777 |
| ASAH1 (rs12544854) | T | TT | | 50 (0.1946) | 1032 (0.2455) | 0.85 (0.75-0.97) | 0.013 |
| ASAH1 (rs12544854) | T | TC | | 134 (0.5214) | 2065 (0.4913) | 0.92 (0.82-1.02) | 0.113 |
| ASAH1 (rs12544854) | T | CC | | 73 (0.284) | 1106 (0.2631) | ref | ref |
| ASAH1 (rs12544854) | T | TT | rec | 50 | 1032 | 0.9 (0.81-1) | 0.054 |
| ASAH1 (rs12544854) | T | TC + TT | dom | 184 | 3097 | 0.9 (0.81-0.99) | 0.032 |
| LOC730144 (rs4262503) | T | TC | | 35 (0.14) | 616 (0.15) | 0.59 (0.33-1.06) | 0.080 |
| LOC730144 (rs4262503) | T | TT | | 224 (0.86) | 3561 (0.85) | ref | ref |
| LOC730144 (rs4262503) | T | TT | rec | 224 | 3561 | 1.22 (1.07-1.39) | 0.003 |
| LOC730144 (rs4262503) | T | TC + TT | dom | | | | |

SNPs in Table 6 had additive P interaction <0.1 in MEGA.
P(int) = P interaction from the Wald test for statin * SNP from the following model: VTE~SNP + statin user or nonuser + SNP * statin user or nonuser + age + sex.
OR (95% CI) and P value for VTE~SNP in last 2 columns calculated in statin nonusers.
VT is interchangeably referred to as VTE.

TABLE 7

| | | | Statin response by genotype group | | | | | | | | |
|---|---|---|---|---|---|---|---|---|---|---|---|
| | | | | | | | HR | HR | | | Risk of VT in no |
| | | | | | | | 95% CI | 95% CI | P- | | statin use group |
| SNP | MODE | GENO_RESP | STATIN_USE | EVENTS_RESP | TOTAL_RESP | HR_RESP | lower_RESP | upper_RESP | value_RESP | P(INT)_RESP | GENO_PLACEBO |
| hCV7543812 | GEN | TT | statin | 40 | 51 | 1.04 | 0.631 | 1.7243 | 0.8698 | 0.00045 | TT |
| hCV7543812 | GEN | TT | no statin | 136 | 195 | ref | — | — | — | 0.00045 | |
| hCV7543812 | GEN | TC | statin | 65 | 134 | 0.56 | 0.389 | 0.7992 | 0.0015 | 0.00045 | TC |
| hCV7543812 | GEN | TC | no statin | 276 | 283 | ref | — | — | — | 0.00045 | |
| hCV7543812 | GEN | CC | statin | 20 | 72 | 0.28 | 0.156 | 0.5093 | <.0001 | 0.00045 | CC |
| hCV7543812 | GEN | CC | no statin | 126 | 129 | ref | — | — | — | 0.00045 | |
| hCV7543812 | REC | TC + CC | statin | 85 | 206 | 0.46 | 0.337 | 0.6217 | <.0001 | 0.00046 | TT |
| hCV7543812 | REC | TC + CC | no statin | 402 | 412 | ref | — | — | — | 0.00046 | |
| hCV2690378 | GEN | GG | statin | 51 | 71 | 0.82 | 0.53 | 1.2743 | 0.3805 | 0.00439 | GG |
| hCV2690378 | GEN | GG | no statin | 187 | 203 | ref | — | — | — | 0.00439 | |
| hCV2690378 | GEN | GT | statin | 47 | 140 | 0.37 | 0.248 | 0.5445 | <.0001 | 0.00439 | GT |
| hCV2690378 | GEN | GT | no statin | 272 | 287 | ref | — | — | — | 0.00439 | |
| hCV2690378 | GEN | TT | statin | 27 | 46 | 0.89 | 0.494 | 1.6077 | 0.7017 | 0.00439 | TT |
| hCV2690378 | GEN | TT | no statin | 79 | 117 | ref | — | — | — | 0.00439 | |
| hCV7543812 | DOM | TC + TT | statin | 105 | 185 | 0.69 | 0.519 | 0.9287 | 0.014 | 0.0048 | TC + TT |
| hCV7543812 | DOM | TC + TT | no statin | 412 | 478 | ref | — | — | — | 0.0048 | |
| hCV931685 | GEN | GG | statin | 90 | 205 | 0.48 | 0.356 | 0.6484 | <.0001 | 0.00984 | GG |
| hCV931685 | GEN | GG | no statin | 413 | 431 | ref | — | — | — | 0.00984 | |
| hCV931685 | GEN | GT | statin | 29 | 48 | 0.86 | 0.492 | 1.5118 | 0.6056 | 0.00984 | GT |
| hCV931685 | GEN | GT | no statin | 120 | 161 | ref | — | — | — | 0.00984 | |
| hCV931685 | GEN | TT | statin | 6 | 4 | 2.76 | 0.489 | 15.611 | 0.25 | 0.00984 | TT |
| hCV931685 | GEN | TT | no statin | 6 | 15 | ref | — | — | — | 0.00984 | |
| hCV11686277 | GEN | CC | statin | 51 | 70 | 0.82 | 0.531 | 1.2762 | 0.3845 | 0.01246 | CC |
| hCV11686277 | GEN | CC | no statin | 190 | 207 | ref | — | — | — | 0.01246 | |
| hCV11686277 | GEN | CG | statin | 48 | 140 | 0.39 | 0.264 | 0.5766 | <.0001 | 0.01246 | CG |
| hCV11686277 | GEN | CG | no statin | 271 | 292 | ref | — | — | — | 0.01246 | |
| hCV11686277 | GEN | GG | statin | 26 | 47 | 0.77 | 0.426 | 1.4035 | 0.3976 | 0.01246 | GG |
| hCV11686277 | GEN | GG | no statin | 78 | 108 | ref | — | — | — | 0.01246 | |
| hCV29260019 | REC | GA + AA | statin | 81 | 138 | 0.77 | 0.553 | 1.0792 | 0.1302 | 0.01356 | GG |
| hCV29260019 | REC | GA + AA | no statin | 319 | 378 | ref | — | — | — | 0.01356 | |
| hDV70820190 | DOM | GA + GG | statin | 116 | 252 | 0.54 | 0.416 | 0.7072 | <.0001 | 0.01407 | GA + GG |
| hDV70820190 | DOM | GA + GG | no statin | 525 | 584 | ref | — | — | — | 0.01407 | |
| hCV931685 | REC | GT + TT | statin | 35 | 52 | 0.98 | 0.579 | 1.6589 | 0.9396 | 0.01448 | GG |
| hCV931685 | REC | GT + TT | no statin | 126 | 176 | ref | — | — | — | 0.01448 | |
| hDV70437895 | DOM | CT + CC | statin | 108 | 237 | 0.52 | 0.397 | 0.6865 | <.0001 | 0.01491 | CT + CC |
| hDV70437895 | DOM | CT + CC | no statin | 505 | 550 | ref | — | — | — | 0.01491 | |
| hCV931685 | DOM | GT + GG | statin | 119 | 253 | 0.55 | 0.422 | 0.7148 | <.0001 | 0.01611 | GT + GG |
| hCV931685 | DOM | GT + GG | no statin | 533 | 592 | ref | — | — | — | 0.01611 | |
| hCV29245634 | GEN | CC | statin | 104 | 227 | 0.5 | 0.38 | 0.6657 | <.0001 | 0.01659 | CC |
| hCV29245634 | GEN | CC | no statin | 471 | 509 | ref | — | — | — | 0.01659 | |
| hCV29245634 | GEN | CT | statin | 21 | 28 | 1.45 | 0.707 | 2.9636 | 0.3114 | 0.01659 | CT |
| hCV29245634 | GEN | CT | no statin | 64 | 96 | ref | — | — | — | 0.01659 | |
| hCV29245634 | GEN | TT | statin | 0 | 2 | 0 | 0 | 2E+158 | 0.9403 | 0.01659 | TT |
| hCV29245634 | GEN | TT | no statin | 4 | 1 | ref | — | — | — | 0.01659 | |
| hDV70437895 | GEN | CC | statin | 65 | 148 | 0.49 | 0.346 | 0.7051 | 0.0001 | 0.01843 | CC |
| hDV70437895 | GEN | CC | no statin | 293 | 285 | ref | — | — | — | 0.01843 | |
| hDV70437895 | GEN | CT | statin | 43 | 89 | 0.56 | 0.364 | 0.8634 | 0.0086 | 0.01843 | CT |
| hDV70437895 | GEN | CT | no statin | 212 | 265 | ref | — | — | — | 0.01843 | |
| hDV70437895 | GEN | TT | statin | 17 | 20 | 1.48 | 0.602 | 3.6304 | 0.3932 | 0.01843 | TT |
| hDV70437895 | GEN | TT | no statin | 34 | 57 | ref | — | — | — | 0.01843 | |
| hDV72050312 | REC | GA + AA | statin | 63 | 98 | 0.83 | 0.562 | 1.2327 | 0.3593 | 0.01937 | GG |
| hDV72050312 | REC | GA + AA | no statin | 201 | 239 | ref | — | — | — | 0.01937 | |
| hCV29948033 | DOM | TC + TT | statin | 116 | 251 | 0.53 | 0.409 | 0.6979 | <.0001 | 0.02073 | TC + TT |
| hCV29948033 | DOM | TC + TT | no statin | 511 | 572 | ref | — | — | — | 0.02073 | |
| hDV70794769 | REC | CT + TT | statin | 63 | 99 | 0.83 | 0.562 | 1.2319 | 0.358 | 0.02149 | CC |
| hDV70794769 | REC | CT + TT | no statin | 204 | 243 | ref | — | — | — | 0.02149 | |
| hCV12066124 | REC | CT + TT | statin | 95 | 189 | 0.66 | 0.485 | 0.896 | 0.0078 | 0.02348 | CC |
| hCV12066124 | REC | CT + TT | no statin | 341 | 435 | ref | — | — | — | 0.02348 | |
| hCV3054799 | REC | AG + GG | statin | 83 | 132 | 0.7 | 0.503 | 0.9774 | 0.0362 | 0.02372 | AA |
| hCV3054799 | REC | AG + GG | no statin | 328 | 360 | ref | — | — | — | 0.02372 | |
| hDV70820190 | GEN | GG | statin | 79 | 178 | 0.49 | 0.354 | 0.6732 | <.0001 | 0.02944 | GG |
| hDV70820190 | GEN | GG | no statin | 367 | 389 | ref | — | — | — | 0.02944 | |
| hDV70820190 | GEN | GA | statin | 37 | 74 | 0.68 | 0.421 | 1.0862 | 0.1057 | 0.02944 | GA |
| hDV70820190 | GEN | GA | no statin | 158 | 195 | ref | — | — | — | 0.02944 | |
| hDV70820190 | GEN | AA | statin | 8 | 5 | 2.05 | 0.506 | 8.3068 | 0.3149 | 0.02944 | AA |
| hDV70820190 | GEN | AA | no statin | 14 | 23 | ref | — | — | — | 0.02944 | |
| hCV1396435 | REC | GT + TT | statin | 95 | 172 | 0.68 | 0.501 | 0.9275 | 0.0147 | 0.02966 | GG |
| hCV1396435 | REC | GT + TT | no statin | 351 | 416 | ref | — | — | — | 0.02966 | |
| hDV70437895 | REC | CT + TT | statin | 60 | 109 | 0.68 | 0.461 | 0.9886 | 0.0435 | 0.03119 | CC |
| hDV70437895 | REC | CT + TT | no statin | 246 | 322 | ref | — | — | — | 0.03119 | |
| hCV11686277 | REC | CG + GG | statin | 74 | 187 | 0.47 | 0.342 | 0.6558 | <.0001 | 0.03337 | CC |
| hCV11686277 | REC | CG + GG | no statin | 349 | 400 | ref | — | — | — | 0.03337 | |
| hCV11778561 | DOM | AT + AA | statin | 92 | 210 | 0.49 | 0.369 | 0.6625 | <.0001 | 0.03501 | AT + AA |
| hCV11778561 | DOM | AT + AA | no statin | 458 | 501 | ref | — | — | — | 0.03501 | |
| hCV2690378 | REC | GT + TT | statin | 74 | 186 | 0.47 | 0.343 | 0.6562 | <.0001 | 0.04169 | GG |
| hCV2690378 | REC | GT + TT | no statin | 351 | 404 | ref | — | — | — | 0.04169 | |
| hDV70830411 | REC | TG + GG | statin | 77 | 179 | 0.47 | 0.339 | 0.6482 | <.0001 | 0.04469 | TT |
| hDV70830411 | REC | TG + GG | no statin | 353 | 376 | ref | — | — | — | 0.04469 | |
| hCV7422169 | DOM | GA + GG | statin | 118 | 253 | 0.54 | 0.417 | 0.708 | <.0001 | 0.04504 | GA + GG |
| hCV7422169 | DOM | GA + GG | no statin | 515 | 581 | ref | — | — | — | 0.04504 | |
| hCV29260019 | GEN | GG | statin | 42 | 119 | 0.36 | 0.234 | 0.5439 | <.0001 | 0.04625 | GG |
| hCV29260019 | GEN | GG | no statin | 219 | 229 | ref | — | — | — | 0.04625 | |
| hCV29260019 | GEN | GA | statin | 65 | 106 | 0.75 | 0.513 | 1.0947 | 0.1357 | 0.04625 | GA |
| hCV29260019 | GEN | GA | no statin | 254 | 292 | ref | — | — | — | 0.04625 | |
| hCV29260019 | GEN | AA | statin | 16 | 32 | 0.86 | 0.419 | 1.7833 | 0.6933 | 0.04625 | AA |
| hCV29260019 | GEN | AA | no statin | 65 | 86 | ref | — | — | — | 0.04625 | |
| hCV29245634 | REC | CT + TT | statin | 21 | 30 | 1.32 | 0.651 | 2.6788 | 0.4409 | 0.04661 | CC |
| hCV29245634 | REC | CT + TT | no statin | 68 | 97 | ref | — | — | — | 0.04661 | |
| hCV29948033 | GEN | TT | statin | 66 | 153 | 0.5 | 0.353 | 0.7033 | <.0001 | 0.05902 | TT |
| hCV29948033 | GEN | TT | no statin | 338 | 383 | ref | — | — | — | 0.05902 | |
| hCV29948033 | GEN | TC | statin | 50 | 98 | 0.58 | 0.382 | 0.8933 | 0.0131 | 0.05902 | TC |
| hCV29948033 | GEN | TC | no statin | 173 | 189 | ref | — | — | — | 0.05902 | |
| hCV29948033 | GEN | CC | statin | 9 | 6 | 2.72 | 0.715 | 10.345 | 0.1423 | 0.05902 | CC |
| hCV29948033 | GEN | CC | no statin | 27 | 34 | ref | — | — | — | 0.05902 | |
| hCV3054799 | GEN | AA | statin | 41 | 125 | 0.42 | 0.273 | 0.6386 | <.0001 | 0.06051 | AA |
| hCV3054799 | GEN | AA | no statin | 211 | 247 | ref | — | — | — | 0.06051 | |
| hCV3054799 | GEN | AG | statin | 66 | 95 | 0.74 | 0.509 | 1.0894 | 0.1288 | 0.06051 | AG |
| hCV3054799 | GEN | AG | no statin | 255 | 272 | ref | — | — | — | 0.06051 | |
| hCV3054799 | GEN | GG | statin | 17 | 37 | 0.57 | 0.284 | 1.1433 | 0.1135 | 0.06051 | GG |
| hCV3054799 | GEN | GG | no statin | 73 | 88 | ref | — | — | — | 0.06051 | |
| hCV31671070 | DOM | AG + AA | statin | 125 | 251 | 0.59 | 0.451 | 0.7603 | <.0001 | 0.07368 | AG + AA |
| hCV31671070 | DOM | AG + AA | no statin | 528 | 591 | ref | — | — | — | 0.07368 | |
| hCV12066124 | GEN | CC | statin | 27 | 68 | 0.38 | 0.225 | 0.625 | 0.0002 | 0.07542 | CC |
| hCV12066124 | GEN | CC | no statin | 193 | 169 | ref | — | — | — | 0.07542 | |
| hCV12066124 | GEN | CT | statin | 72 | 129 | 0.68 | 0.475 | 0.9711 | 0.0339 | 0.07542 | CT |
| hCV12066124 | GEN | CT | no statin | 254 | 296 | ref | — | — | — | 0.07542 | |
| hCV12066124 | GEN | TT | statin | 23 | 60 | 0.6 | 0.328 | 1.1042 | 0.101 | 0.07542 | TT |
| hCV12066124 | GEN | TT | no statin | 87 | 139 | ref | — | — | — | 0.07542 | |
| hCV1772768 | REC | GA + AA | statin | 84 | 146 | 0.64 | 0.463 | 0.8972 | 0.0093 | 0.0798 | GG |
| hCV1772768 | REC | GA + AA | no statin | 308 | 351 | ref | — | — | — | 0.0798 | |
| hDV72050312 | GEN | GG | statin | 62 | 159 | 0.43 | 0.305 | 0.6143 | <.0001 | 0.08047 | GG |
| hDV72050312 | GEN | GG | no statin | 337 | 368 | ref | — | — | — | 0.08047 | |
| hDV72050312 | GEN | GA | statin | 50 | 83 | 0.81 | 0.528 | 1.2483 | 0.3424 | 0.08047 | GA |
| hDV72050312 | GEN | GA | no statin | 172 | 215 | ref | — | — | — | 0.08047 | |
| hDV72050312 | GEN | AA | statin | 13 | 15 | 0.79 | 0.285 | 2.1974 | 0.6528 | 0.08047 | AA |
| hDV72050312 | GEN | AA | no statin | 29 | 24 | ref | — | — | — | 0.08047 | |
| hCV9540478 | REC | TC + CC | statin | 38 | 94 | 0.44 | 0.282 | 0.6919 | 0.0004 | 0.08096 | TT |
| hCV9540478 | REC | TC + CC | no statin | 201 | 204 | ref | — | — | — | 0.08096 | |
| hCV2690378 | DOM | GT + GG | statin | 98 | 211 | 0.52 | 0.389 | 0.6943 | <.0001 | 0.08114 | GT + GG |
| hCV2690378 | DOM | GT + GG | no statin | 459 | 490 | ref | — | — | — | 0.08114 | |
| hCV29245634 | DOM | CT + CC | statin | 125 | 255 | 0.58 | 0.446 | 0.7496 | <.0001 | 0.08203 | CT + CC |
| hCV29245634 | DOM | CT + CC | no statin | 535 | 605 | ref | — | — | — | 0.08203 | |
| hCV16233239 | REC | AG + GG | statin | 48 | 86 | 0.8 | 0.522 | 1.2301 | 0.3111 | 0.0829 | AA |
| hCV16233239 | REC | AG + GG | no statin | 196 | 251 | ref | — | — | — | 0.0829 | |
| hCV3286482 | DOM | TC + TT | statin | 116 | 245 | 0.55 | 0.419 | 0.7162 | <.0001 | 0.08603 | TC + TT |
| hCV3286482 | DOM | TC + TT | no statin | 517 | 572 | ref | — | — | — | 0.08603 | |
| hDV70794769 | GEN | CC | statin | 62 | 158 | 0.43 | 0.306 | 0.6163 | <.0001 | 0.0899 | CC |
| hDV70794769 | GEN | CC | no statin | 334 | 364 | ref | — | — | — | 0.0899 | |
| hDV70794769 | GEN | CT | statin | 50 | 84 | 0.82 | 0.534 | 1.2614 | 0.3676 | 0.0899 | CT |
| hDV70794769 | GEN | CT | no statin | 174 | 220 | ref | — | — | — | 0.0899 | |
| hDV70794769 | GEN | TT | statin | 13 | 15 | 0.69 | 0.246 | 1.9396 | 0.4823 | 0.0899 | TT |
| hDV70794769 | GEN | TT | no statin | 30 | 23 | ref | — | — | — | 0.0899 | |
| hDV77026147 | DOM | CT + CC | statin | 124 | 257 | 0.56 | 0.435 | 0.7324 | <.0001 | 0.09216 | CT + CC |
| hDV77026147 | DOM | CT + CC | no statin | 535 | 602 | ref | — | — | — | 0.09216 | |
| hCV1396435 | GEN | GG | statin | 30 | 85 | 0.38 | 0.235 | 0.627 | 0.0001 | 0.09466 | GG |
| hCV1396435 | GEN | GG | no statin | 187 | 191 | ref | — | — | — | 0.09466 | |
| hCV1396435 | GEN | GT | statin | 75 | 134 | 0.67 | 0.473 | 0.9506 | 0.0248 | 0.09466 | GT |
| hCV1396435 | GEN | GT | no statin | 258 | 305 | ref | — | — | — | 0.09466 | |
| hCV1396435 | GEN | TT | statin | 20 | 38 | 0.75 | 0.386 | 1.4425 | 0.384 | 0.09466 | TT |
| hCV1396435 | GEN | TT | no statin | 93 | 111 | ref | — | — | — | 0.09466 | |
| hDV70820190 | REC | GA + AA | statin | 45 | 79 | 0.77 | 0.491 | 1.1912 | 0.2358 | 0.09992 | GG |
| hDV70820190 | REC | GA + AA | no statin | 172 | 218 | ref | — | — | — | 0.09992 | |

| | | | Risk of VT in no statin use group | | | | | | |
|---|---|---|---|---|---|---|---|---|---|
| | | | | | | HR | HR | | |
| | | | | | | 95% CI | 95%CI | P- | |
| SNP | MODE | GENO_RESP | EVENTS_PLACEBO | TOTAL_PLACEBO | HR_PLACEBO | lower_PLACEBO | upper_PLACEBO | value_PLACEBO | P_DF2_PLACEBO |
| hCV7543812 | GEN | TT | 136 | 195 | 0.71 | 0.5117 | 0.989 | 0.043 | 0.0373 |
| hCV7543812 | GEN | TT | — | — | — | — | — | — | — |
| hCV7543812 | GEN | TC | 276 | 283 | 1 | 0.7414 | 1.343 | 0.9893 | 0.0373 |
| hCV7543812 | GEN | TC | — | — | — | — | — | — | — |
| hCV7543812 | GEN | CC | 126 | 129 | ref | — | — | — | 0.0373 |
| hCV7543812 | GEN | CC | — | — | — | — | — | — | — |
| hCV7543812 | REC | TC + CC | 136 | 195 | 0.71 | 0.5499 | 0.923 | 0.0103 | — |
| hCV7543812 | REC | TC + CC | — | — | — | — | — | — | — |
| hCV2690378 | GEN | GG | 187 | 203 | 1.35 | 0.9508 | 1.91 | 0.0936 | 0.133 |
| hCV2690378 | GEN | GG | — | — | — | — | — | — | — |
| hCV2690378 | GEN | GT | 272 | 287 | 1.39 | 1.0016 | 1.941 | 0.0489 | 0.133 |
| hCV2690378 | GEN | GT | — | — | — | — | — | — | — |
| hCV2690378 | GEN | TT | 79 | 117 | ref | — | — | — | 0.133 |
| hCV2690378 | GEN | TT | — | — | — | — | — | — | — |
| hCV7543812 | DOM | TC + TT | 412 | 478 | 0.88 | 0.666 | 1.165 | 0.3726 | — |
| hCV7543812 | DOM | TC + TT | — | — | — | — | — | — | — |
| hCV931685 | GEN | GG | 413 | 431 | 2.26 | 0.8633 | 5.895 | 0.0969 | 0.0639 |
| hCV931685 | GEN | GG | — | — | — | — | — | — | — |
| hCV931685 | GEN | GT | 120 | 161 | 1.76 | 0.6621 | 4.696 | 0.2564 | 0.0639 |
| hCV931685 | GEN | GT | — | — | — | — | — | — | — |
| hCV931685 | GEN | TT | 6 | 15 | ref | — | — | — | 0.0639 |
| hCV931685 | GEN | TT | — | — | — | — | — | — | — |
| hCV11686277 | GEN | CC | 190 | 207 | 1.25 | 0.8787 | 1.779 | 0.2145 | 0.357 |
| hCV11686277 | GEN | CC | — | — | — | — | — | — | — |
| hCV11686277 | GEN | CG | 271 | 292 | 1.27 | 0.9077 | 1.776 | 0.1632 | 0.357 |
| hCV11686277 | GEN | CG | — | — | — | — | — | — | — |
| hCV11686277 | GEN | GG | 78 | 108 | ref | — | — | — | 0.357 |
| hCV11686277 | GEN | GG | — | — | — | — | — | — | — |
| hCV29260019 | REC | GA + AA | 219 | 229 | 1.14 | 0.8974 | 1.446 | 0.2846 | — |
| hCV29260019 | REC | GA + AA | — | — | — | — | — | — | — |
| hDV70820190 | DOM | GA + GG | 525 | 584 | 1.43 | 0.7288 | 2.82 | 0.2967 | — |
| hDV70820190 | DOM | GA + GG | — | — | — | — | — | — | — |
| hCV931685 | REC | GT + TT | 413 | 431 | 1.33 | 1.0163 | 1.731 | 0.0376 | — |
| hCV931685 | REC | GT + TT | — | — | — | — | — | — | — |
| hDV70437895 | DOM | CT + CC | 505 | 550 | 1.53 | 0.9848 | 2.388 | 0.0585 | — |
| hDV70437895 | DOM | CT + CC | — | — | — | — | — | — | — |
| hCV931685 | DOM | GT + GG | 533 | 592 | 2.12 | 0.8129 | 5.524 | 0.1245 | — |
| hCV931685 | DOM | GT + GG | — | — | — | — | — | — | — |
| hCV29245634 | GEN | CC | 471 | 509 | 0.26 | 0.0288 | 2.338 | 0.2291 | 0.066 |
| hCV29245634 | GEN | CC | — | — | — | — | — | — | — |
| hCV29245634 | GEN | CT | 64 | 96 | 0.18 | 0.0201 | 1.691 | 0.1347 | 0.066 |
| hCV29245634 | GEN | CT | — | — | — | — | — | — | — |
| hCV29245634 | GEN | TT | 4 | 1 | ref | — | — | — | 0.066 |
| hCV29245634 | GEN | TT | — | — | — | — | — | — | — |
| hDV70437895 | GEN | CC | 293 | 285 | 1.71 | 1.086 | 2.706 | 0.0206 | 0.0234 |
| hDV70437895 | GEN | CC | — | — | — | — | — | — | — |
| hDV70437895 | GEN | CT | 212 | 265 | 1.34 | 0.8434 | 2.128 | 0.2155 | 0.0234 |
| hDV70437895 | GEN | CT | — | — | — | — | — | — | — |
| hDV70437895 | GEN | TT | 34 | 57 | ref | — | — | — | 0.0234 |
| hDV70437895 | GEN | TT | — | — | — | — | — | — | — |
| hDV72050312 | REC | GA + AA | 337 | 368 | 1.1 | 0.8637 | 1.394 | 0.4473 | — |
| hDV72050312 | REC | GA + AA | — | — | — | — | — | — | — |
| hCV29948033 | DOM | TC + TT | 511 | 572 | 1.16 | 0.6865 | 1.945 | 0.5864 | — |
| hCV29948033 | DOM | TC + TT | — | — | — | — | — | — | — |
| hDV70794769 | REC | CT + TT | 334 | 364 | 1.1 | 0.8686 | 1.4 | 0.422 | — |
| hDV70794769 | REC | CT + TT | — | — | — | — | — | — | — |
| hCV12066124 | REC | CT + TT | 193 | 169 | 1.49 | 1.1552 | 1.911 | 0.002 | — |
| hCV12066124 | REC | CT + TT | — | — | — | — | — | — | — |
| hCV3054799 | REC | AG + GG | 211 | 247 | 0.94 | 0.7447 | 1.198 | 0.6363 | — |
| hCV3054799 | REC | AG + GG | — | — | — | — | — | — | — |
| hDV70820190 | GEN | GG | 367 | 389 | 1.5 | 0.7614 | 2.974 | 0.2398 | 0.2887 |
| hDV70820190 | GEN | GG | — | — | — | — | — | — | — |
| hDV70820190 | GEN | GA | 158 | 195 | 1.29 | 0.642 | 2.597 | 0.4736 | 0.2887 |
| hDV70820190 | GEN | GA | — | — | — | — | — | — | — |
| hDV70820190 | GEN | AA | 14 | 23 | ref | — | — | — | 0.2887 |
| hDV70820190 | GEN | AA | — | — | — | — | — | — | — |
| hCV1396435 | REC | GT + TT | 187 | 191 | 1.16 | 0.905 | 1.485 | 0.242 | — |
| hCV1396435 | REC | GT + TT | — | — | — | — | — | — | — |
| hDV70437895 | REC | CT + TT | 293 | 285 | 1.34 | 1.0607 | 1.691 | 0.0141 | — |
| hDV70437895 | REC | CT + TT | — | — | — | — | — | — | — |
| hCV11686277 | REC | CG + GG | 190 | 207 | 1.04 | 0.8177 | 1.333 | 0.7295 | — |
| hCV11686277 | REC | CG + GG | — | — | — | — | — | — | — |
| hCV11778561 | DOM | AT + AA | 458 | 501 | 1.22 | 0.8884 | 1.675 | 0.2194 | — |
| hCV11778561 | DOM | AT + AA | — | — | — | — | — | — | — |
| hCV2690378 | REC | GT + TT | 187 | 203 | 1.05 | 0.8232 | 1.345 | 0.6842 | — |
| hCV2690378 | REC | GT + TT | — | — | — | — | — | — | — |
| hDV70830411 | REC | TG + GG | 186 | 231 | 0.85 | 0.6685 | 1.085 | 0.1942 | — |
| hDV70830411 | REC | TG + GG | — | — | — | — | — | — | — |
| hCV7422169 | DOM | GA + GG | 515 | 581 | 0.99 | 0.5617 | 1.754 | 0.9792 | — |
| hCV7422169 | DOM | GA + GG | — | — | — | — | — | — | — |
| hCV29260019 | GEN | GG | 219 | 229 | 1.28 | 0.8796 | 1.853 | 0.1987 | 0.416 |
| hCV29260019 | GEN | GG | — | — | — | — | — | — | — |
| hCV29260019 | GEN | GA | 254 | 292 | 1.16 | 0.8036 | 1.665 | 0.4335 | 0.416 |
| hCV29260019 | GEN | GA | — | — | — | — | — | — | — |
| hCV29260019 | GEN | AA | 65 | 86 | ref | — | — | — | 0.416 |
| hCV29260019 | GEN | AA | — | — | — | — | — | — | — |
| hCV29245634 | REC | CT + TT | 471 | 509 | 1.34 | 0.9614 | 1.881 | 0.0836 | — |
| hCV29245634 | REC | CT + TT | — | — | — | — | — | — | — |
| hCV29948033 | GEN | TT | 338 | 383 | 1.14 | 0.6725 | 1.931 | 0.6271 | 0.8191 |
| hCV29948033 | GEN | TT | — | — | — | — | — | — | — |
| hCV29948033 | GEN | TC | 173 | 189 | 1.19 | 0.6871 | 2.054 | 0.5374 | 0.8191 |
| hCV29948033 | GEN | TC | — | — | — | — | — | — | — |
| hCV29948033 | GEN | CC | 27 | 34 | ref | — | — | — | 0.8191 |
| hCV29948033 | GEN | CC | — | — | — | — | — | — | — |
| hCV3054799 | GEN | AA | 211 | 247 | 1.04 | 0.7272 | 1.499 | 0.8157 | 0.6888 |
| hCV3054799 | GEN | AA | — | — | — | — | — | — | — |
| hCV3054799 | GEN | AG | 255 | 272 | 1.14 | 0.7991 | 1.626 | 0.4703 | 0.6888 |
| hCV3054799 | GEN | AG | — | — | — | — | — | — | — |
| hCV3054799 | GEN | GG | 73 | 88 | ref | — | — | — | 0.6888 |
| hCV3054799 | GEN | GG | — | — | — | — | — | — | — |
| hCV31671070 | DOM | AG + AA | 528 | 591 | 1.43 | 0.6402 | 3.173 | 0.3855 | — |
| hCV31671070 | DOM | AG + AA | — | — | — | — | — | — | — |
| hCV12066124 | GEN | CC | 193 | 169 | 1.87 | 1.3346 | 2.634 | 0.0003 | 0.0012 |
| hCV12066124 | GEN | CC | — | — | — | — | — | — | — |
| hCV12066124 | GEN | CT | 254 | 296 | 1.38 | 1.0085 | 1.901 | 0.0442 | 0.0012 |
| hCV12066124 | GEN | CT | — | — | — | — | — | — | — |
| hCV12066124 | GEN | TT | 87 | 139 | ref | — | — | — | 0.0012 |
| hCV12066124 | GEN | TT | — | — | — | — | — | — | — |
| hCV1772768 | REC | GA + AA | 230 | 256 | 1.03 | 0.8109 | 1.298 | 0.8305 | — |
| hCV1772768 | REC | GA + AA | — | — | — | — | — | — | — |
| hDV72050312 | GEN | GG | 337 | 368 | 0.79 | 0.4485 | 1.382 | 0.405 | 0.3308 |
| hDV72050312 | GEN | GG | — | — | — | — | — | — | — |
| hDV72050312 | GEN | GA | 172 | 215 | 0.69 | 0.3843 | 1.223 | 0.2011 | 0.3308 |
| hDV72050312 | GEN | GA | — | — | — | — | — | — | — |
| hDV72050312 | GEN | AA | 29 | 24 | ref | — | — | — | 0.3308 |
| hDV72050312 | GEN | AA | — | — | — | — | — | — | — |
| hCV9540478 | REC | TC + CC | 335 | 402 | 0.84 | 0.6583 | 1.072 | 0.1604 | — |
| hCV9540478 | REC | TC + CC | — | — | — | — | — | — | — |
| hCV2690378 | DOM | GT + GG | 459 | 490 | 1.37 | 1.0052 | 1.881 | 0.0463 | — |
| hCV2690378 | DOM | GT + GG | — | — | — | — | — | — | — |
| hCV29245634 | DOM | CT + CC | 535 | 605 | 0.25 | 0.0274 | 2.218 | 0.2115 | — |
| hCV29245634 | DOM | CT + CC | — | — | — | — | — | — | — |
| hCV16233239 | REC | AG + GG | 342 | 356 | 1.25 | 0.9806 | 1.583 | 0.0719 | — |
| hCV16233239 | REC | AG + GG | — | — | — | — | — | — | — |
| hCV3286482 | DOM | TC + TT | 517 | 572 | 1.49 | 0.8535 | 2.591 | 0.1613 | — |
| hCV3286482 | DOM | TC + TT | — | — | — | — | — | — | — |
| hDV70794769 | GEN | CC | 334 | 364 | 0.73 | 0.4152 | 1.286 | 0.2765 | 0.2084 |
| hDV70794769 | GEN | CC | — | — | — | — | — | — | — |
| hDV70794769 | GEN | CT | 174 | 220 | 0.63 | 0.3509 | 1.12 | 0.1148 | 0.2084 |
| hDV70794769 | GEN | CT | — | — | — | — | — | — | — |
| hDV70794769 | GEN | TT | 30 | 23 | ref | — | — | — | 0.2084 |
| hDV70794769 | GEN | TT | — | — | — | — | — | — | — |
| hDV77026147 | DOM | CT + CC | 535 | 602 | 2.24 | 0.4312 | 11.62 | 0.3376 | — |
| hDV77026147 | DOM | CT + CC | — | — | — | — | — | — | — |
| hCV1396435 | GEN | GG | 187 | 191 | 1.17 | 0.8309 | 1.648 | 0.3681 | 0.5028 |
| hCV1396435 | GEN | GG | — | — | — | — | — | — | — |
| hCV1396435 | GEN | GT | 258 | 305 | 1.01 | 0.734 | 1.398 | 0.9373 | 0.5028 |
| hCV1396435 | GEN | GT | — | — | — | — | — | — | — |
| hCV1396435 | GEN | TT | 93 | 111 | ref | — | — | — | 0.5028 |
| hCV1396435 | GEN | TT | — | — | — | — | — | — | — |
| hDV70820190 | REC | GA + AA | 367 | 389 | 1.19 | 0.9331 | 1.527 | 0.1589 | — |
| hDV70820190 | REC | GA + AA | — | — | — | — | — | — | — |

| | | | Risk of VT in statin use group | | | | | | | |
|---|---|---|---|---|---|---|---|---|---|---|
| | | | | | | | HR | HR | | |
| | | | | | | | 95% CI | 95% CI | P- | |
| SNP | MODE | GENO_RESP | GENO_statin | EVENTS_statin | TOTAL_statin | HR_statin | lower_statin | upper_statin | value_statin | P_DF2_statin |
| hCV7543812 | GEN | TT | TT | 40 | 51 | 2.85 | 1.4892 | 5.4472 | 0.0016 | 0.0065 |
| hCV7543812 | GEN | TT | | — | — | — | — | — | — | — |
| hCV7543812 | GEN | TC | TC | 65 | 134 | 1.76 | 0.9862 | 3.1463 | 0.0557 | 0.0065 |
| hCV7543812 | GEN | TC | | — | — | — | — | — | — | — |
| hCV7543812 | GEN | CC | CC | 20 | 72 | ref | — | — | — | 0.0065 |
| hCV7543812 | GEN | CC | | — | — | — | — | — | — | — |
| hCV7543812 | REC | TC + CC | TT | 40 | 51 | 1.9 | 1.1708 | 3.0924 | 0.0094 | — |
| hCV7543812 | REC | TC + CC | | — | — | — | — | — | — | — |
| hCV2690378 | GEN | GG | GG | 51 | 71 | 1.22 | 0.6713 | 2.2133 | 0.5154 | 0.0078 |
| hCV2690378 | GEN | GG | | — | — | — | — | — | — | — |
| hCV2690378 | GEN | GT | GT | 47 | 140 | 0.57 | 0.3215 | 1.0235 | 0.0599 | 0.0078 |
| hCV2690378 | GEN | GT | | — | — | — | — | — | — | — |
| hCV2690378 | GEN | TT | TT | 27 | 46 | ref | — | — | — | 0.0078 |
| hCV2690378 | GEN | TT | | — | — | — | — | — | — | — |
| hCV7543812 | DOM | TC + TT | TC + TT | 105 | 185 | 2.06 | 1.1851 | 3.5833 | 0.0104 | — |
| hCV7543812 | DOM | TC + TT | | — | — | — | — | — | — | — |
| hCV931685 | GEN | GG | GG | 90 | 205 | 0.3 | 0.0821 | 1.0866 | 0.0667 | 0.104 |
| hCV931685 | GEN | GG | | — | — | — | — | — | — | — |
| hCV931685 | GEN | GT | GT | 29 | 48 | 0.42 | 0.1077 | 1.6061 | 0.2031 | 0.104 |
| hCV931685 | GEN | GT | | — | — | — | — | — | — | — |
| hCV931685 | GEN | TT | TT | 6 | 4 | ref | — | — | — | 0.104 |
| hCV931685 | GEN | TT | | — | — | — | — | — | — | — |
| hCV11686277 | GEN | CC | CC | 51 | 70 | 1.31 | 0.7207 | 2.3934 | 0.3734 | 0.0098 |
| hCV11686277 | GEN | CC | | — | — | — | — | — | — | — |
| hCV11686277 | GEN | CG | CG | 48 | 140 | 0.62 | 0.3476 | 1.1112 | 0.1086 | 0.0098 |
| hCV11686277 | GEN | CG | | — | — | — | — | — | — | — |
| hCV11686277 | GEN | GG | GG | 26 | 47 | ref | — | — | — | 0.0098 |
| hCV11686277 | GEN | GG | | — | — | — | — | — | — | — |
| hCV29260019 | REC | GA + AA | GG | 42 | 119 | 0.6 | 0.3805 | 0.9313 | 0.0231 | — |
| hCV29260019 | REC | GA + AA | | — | — | — | — | — | — | — |
| hDV70820190 | DOM | GA + GG | GA + GG | 116 | 252 | 0.29 | 0.0922 | 0.903 | 0.0327 | — |
| hDV70820190 | DOM | GA + GG | | — | — | — | — | — | — | — |
| hCV931685 | REC | GT + TT | GG | 90 | 205 | 0.65 | 0.3932 | 1.0614 | 0.0846 | — |
| hCV931685 | REC | GT + TT | | — | — | — | — | — | — | — |
| hDV70437895 | DOM | CT + CC | CT + CC | 108 | 237 | 0.53 | 0.2635 | 1.0523 | 0.0694 | — |
| hDV70437895 | DOM | CT + CC | | — | — | — | — | — | — | — |
| hCV931685 | DOM | GT + GG | GT + GG | 119 | 253 | 0.32 | 0.0884 | 1.1575 | 0.0824 | — |
| hCV931685 | DOM | GT + GG | | — | — | — | — | — | — | — |
| hCV29245634 | GEN | CC | CC | 104 | 227 | 43000 | 0 | 1E+182 | 0.9592 | 0.2804 |
| hCV29245634 | GEN | CC | | — | — | — | — | — | — | — |
| hCV29245634 | GEN | CT | CT | 21 | 28 | 71000 | 0 | 2E+182 | 0.9573 | 0.2804 |
| hCV29245634 | GEN | CT | | — | — | — | — | — | — | — |
| hCV29245634 | GEN | TT | TT | 0 | 2 | ref | — | — | — | 0.2804 |
| hCV29245634 | GEN | TT | | — | — | — | — | — | — | — |
| hDV70437895 | GEN | CC | CC | 65 | 148 | 0.51 | 0.25 | 1.0405 | 0.0642 | 0.1798 |
| hDV70437895 | GEN | CC | | — | — | — | — | — | — | — |
| hDV70437895 | GEN | CT | CT | 43 | 89 | 0.56 | 0.2621 | 1.1868 | 0.1297 | 0.1798 |
| hDV70437895 | GEN | CT | | — | — | — | — | — | — | — |
| hDV70437895 | GEN | TT | TT | 17 | 20 | ref | — | — | — | 0.1798 |
| hDV70437895 | GEN | TT | | — | — | — | — | — | — | — |
| hDV72050312 | REC | GA + AA | GG | 62 | 159 | 0.61 | 0.3943 | 0.9355 | 0.0237 | — |
| hDV72050312 | REC | GA + AA | | — | — | — | — | — | — | — |
| hCV29948033 | DOM | TC + TT | TC + TT | 116 | 251 | 0.3 | 0.1035 | 0.8704 | 0.0267 | — |
| hCV29948033 | DOM | TC + TT | | — | — | — | — | — | — | — |
| hDV70794769 | REC | CT + TT | CC | 62 | 158 | 0.62 | 0.4006 | 0.9498 | 0.0282 | — |
| hDV70794769 | REC | CT + TT | | — | — | — | — | — | — | — |
| hCV12066124 | REC | CT + TT | CC | 27 | 68 | 0.77 | 0.4624 | 1.29 | 0.3237 | — |
| hCV12066124 | REC | CT + TT | | — | — | — | — | — | — | — |
| hCV3054799 | REC | AG + GG | AA | 41 | 125 | 0.52 | 0.3344 | 0.8198 | 0.0047 | — |
| hCV3054799 | REC | AG + GG | | — | — | — | — | — | — | — |
| hDV70820190 | GEN | GG | GG | 79 | 178 | 0.28 | 0.088 | 0.8787 | 0.0292 | 0.0908 |
| hDV70820190 | GEN | GG | | — | — | — | — | — | — | — |
| hDV70820190 | GEN | GA | GA | 37 | 74 | 0.31 | 0.0957 | 1.0268 | 0.0553 | 0.0908 |
| hDV70820190 | GEN | GA | | — | — | — | — | — | — | — |
| hDV70820190 | GEN | AA | AA | 8 | 5 | ref | — | — | — | 0.0908 |
| hDV70820190 | GEN | AA | | — | — | — | — | — | — | — |
| hCV1396435 | REC | GT + TT | GG | 30 | 85 | 0.63 | 0.3882 | 1.0284 | 0.0647 | — |
| hCV1396435 | REC | GT + TT | | — | — | — | — | — | — | — |
| hDV70437895 | REC | CT + TT | CC | 65 | 148 | 0.79 | 0.5162 | 1.2238 | 0.297 | — |
| hDV70437895 | REC | CT + TT | | — | — | — | — | — | — | — |
| hCV11686277 | REC | CG + GG | CC | 51 | 70 | 1.83 | 1.1658 | 2.8751 | 0.0086 | — |
| hCV11686277 | REC | CG + GG | | — | — | — | — | — | — | — |
| hCV11778561 | DOM | AT + AA | AT + AA | 92 | 210 | 0.61 | 0.3675 | 1.0239 | 0.0615 | — |
| hCV11778561 | DOM | AT + AA | | — | — | — | — | — | — | — |
| hCV2690378 | REC | GT + TT | GG | 51 | 71 | 1.79 | 1.1434 | 2.8144 | 0.011 | — |
| hCV2690378 | REC | GT + TT | | — | — | — | — | — | — | — |
| hDV70830411 | REC | TG + GG | TT | 48 | 77 | 1.45 | 0.9242 | 2.2691 | 0.1061 | — |
| hDV70830411 | REC | TG + GG | | — | — | — | — | — | — | — |
| hCV7422169 | DOM | GA + GG | GA + GG | 118 | 253 | 0.26 | 0.0748 | 0.9243 | 0.0373 | — |
| hCV7422169 | DOM | GA + GG | | — | — | — | — | — | — | — |
| hCV29260019 | GEN | GG | GG | 42 | 119 | 0.71 | 0.3538 | 1.4308 | 0.3395 | 0.0605 |
| hCV29260019 | GEN | GG | | — | — | — | — | — | — | — |
| hCV29260019 | GEN | GA | GA | 65 | 106 | 1.26 | 0.6363 | 2.4766 | 0.5118 | 0.0605 |
| hCV29260019 | GEN | GA | | — | — | — | — | — | — | — |
| hCV29260019 | GEN | AA | AA | 16 | 32 | ref | — | — | — | 0.0605 |
| hCV29260019 | GEN | AA | | — | — | — | — | — | — | — |
| hCV29245634 | REC | CT + TT | CC | 104 | 227 | 0.65 | 0.3571 | 1.1968 | 0.1683 | — |
| hCV29245634 | REC | CT + TT | | — | — | — | — | — | — | — |
| hCV29948033 | GEN | TT | TT | 66 | 153 | 0.28 | 0.0951 | 0.8275 | 0.0213 | 0.0674 |
| hCV29948033 | GEN | TT | | — | — | — | — | — | — | — |
| hCV29948033 | GEN | TC | TC | 50 | 98 | 0.33 | 0.1102 | 0.9849 | 0.0469 | 0.0674 |
| hCV29948033 | GEN | TC | | — | — | — | — | — | — | — |
| hCV29948033 | GEN | CC | CC | 9 | 6 | ref | — | — | — | 0.0674 |
| hCV29948033 | GEN | CC | | — | — | — | — | — | — | — |
| hCV3054799 | GEN | AA | AA | 41 | 125 | 0.72 | 0.3683 | 1.4234 | 0.3491 | 0.0078 |
| hCV3054799 | GEN | AA | | — | — | — | — | — | — | — |
| hCV3054799 | GEN | AG | AG | 66 | 95 | 1.54 | 0.7943 | 2.9729 | 0.202 | 0.0078 |
| hCV3054799 | GEN | AG | | — | — | — | — | — | — | — |
| hCV3054799 | GEN | GG | GG | 17 | 37 | ref | — | — | — | 0.0078 |
| hCV3054799 | GEN | GG | | — | — | — | — | — | — | — |
| hCV31671070 | DOM | AG + AA | AG + AA | 125 | 251 | 2E+06 | 0 | — | 0.9868 | — |
| hCV31671070 | DOM | AG + AA | | — | — | — | — | — | — | — |
| hCV12066124 | GEN | CC | CC | 27 | 68 | 1.01 | 0.5219 | 1.9537 | 0.977 | 0.2627 |
| hCV12066124 | GEN | CC | | — | — | — | — | — | — | — |
| hCV12066124 | GEN | CT | CT | 72 | 129 | 1.45 | 0.8244 | 2.5485 | 0.1973 | 0.2627 |
| hCV12066124 | GEN | CT | | — | — | — | — | — | — | — |
| hCV12066124 | GEN | TT | TT | 23 | 60 | ref | — | — | — | 0.2627 |
| hCV12066124 | GEN | TT | | — | — | — | — | — | — | — |
| hCV1772768 | REC | GA + AA | GG | 41 | 110 | 0.65 | 0.4134 | 1.0147 | 0.0579 | — |
| hCV1772768 | REC | GA + AA | | — | — | — | — | — | — | — |
| hDV72050312 | GEN | GG | GG | 62 | 159 | 0.45 | 0.2043 | 1.0116 | 0.0534 | 0.054 |
| hDV72050312 | GEN | GG | | — | — | — | — | — | — | — |
| hDV72050312 | GEN | GA | GA | 50 | 83 | 0.7 | 0.3087 | 1.6002 | 0.4009 | 0.054 |
| hDV72050312 | GEN | GA | | — | — | — | — | — | — | — |
| hDV72050312 | GEN | AA | AA | 13 | 15 | ref | — | — | — | 0.054 |
| hDV72050312 | GEN | AA | | — | — | — | — | — | — | — |
| hCV9540478 | REC | TC + CC | TT | 87 | 163 | 1.33 | 0.8381 | 2.0967 | 0.2282 | — |
| hCV9540478 | REC | TC + CC | | — | — | — | — | — | — | — |
| hCV2690378 | DOM | GT + GG | GT + GG | 98 | 211 | 0.79 | 0.4646 | 1.3477 | 0.3888 | — |
| hCV2690378 | DOM | GT + GG | | — | — | — | — | — | — | — |
| hCV29245634 | DOM | CT + CC | CT + CC | 125 | 255 | 9E+05 | 0 | — | 0.9883 | — |
| hCV29245634 | DOM | CT + CC | | — | — | — | — | — | — | — |
| hCV16233239 | REC | AG + GG | AA | 77 | 171 | 0.8 | 0.5152 | 1.2554 | 0.3376 | — |
| hCV16233239 | REC | AG + GG | | — | — | — | — | — | — | — |
| hCV3286482 | DOM | TC + TT | TC + TT | 116 | 245 | 0.59 | 0.2377 | 1.4739 | 0.2599 | — |
| hCV3286482 | DOM | TC + TT | | — | — | — | — | — | — | — |
| hDV70794769 | GEN | CC | CC | 62 | 158 | 0.46 | 0.2056 | 1.0179 | 0.0553 | 0.0614 |
| hDV70794769 | GEN | CC | | — | — | — | — | — | — | — |
| hDV70794769 | GEN | CT | CT | 50 | 84 | 0.7 | 0.3054 | 1.5824 | 0.3862 | 0.0614 |
| hDV70794769 | GEN | CT | | — | — | — | — | — | — | — |
| hDV70794769 | GEN | TT | TT | 13 | 15 | ref | — | — | — | 0.0614 |
| hDV70794769 | GEN | TT | | — | — | — | — | — | — | — |
| hDV77026147 | DOM | CT + CC | CT + CC | 124 | 257 | 0 | 0 | — | 0.9867 | — |
| hDV77026147 | DOM | CT + CC | | — | — | — | — | — | — | — |
| hCV1396435 | GEN | GG | GG | 30 | 85 | 0.66 | 0.3299 | 1.3053 | 0.2299 | 0.1794 |
| hCV1396435 | GEN | GG | | — | — | — | — | — | — | — |
| hCV1396435 | GEN | GT | GT | 75 | 134 | 1.05 | 0.567 | 1.942 | 0.8783 | 0.1794 |
| hCV1396435 | GEN | GT | | — | — | — | — | — | — | — |
| hCV1396435 | GEN | TT | TT | 20 | 38 | ref | — | — | — | 0.1794 |
| hCV1396435 | GEN | TT | | — | — | — | — | — | — | — |
| hDV70820190 | REC | GA + AA | GG | 79 | 178 | 0.78 | 0.4957 | 1.2255 | 0.2805 | — |
| hDV70820190 | REC | GA + AA | | — | — | — | — | — | — | — |

Above analysis adjusted for sex and age.

TABLE 8

| | | Primary VT | | | | | | | | | | | | | |
|---|---|---|---|---|---|---|---|---|---|---|---|---|---|---|---|
| | | | | | | OR | OR | | | | | | | | |
| | | | GENO | | Odds | 95% CI | 95% CI | EFFECT | | | | HW (control) | Recurrent VT | | |
| SNP rs # | Gene | MODE | TYPE | Strata | Ratio | lower | upper | LABEL | Variable | ProbChiSq | P_DF2 | pExact | GENO_ALL | EVENTS_ALL | TOTAL_ALL |
| rs3820059 | C1orf114 | GEN | AG | All | 1.127 | 1.027 | 1.237 | GEN | GEN | 0.0119 | 0.00364 | 0.0353 | AG | 248 | 1633 |
| | | | | | | | | HET | | | | | | | |
| rs3820059 | C1orf114 | GEN | AA | All | 1.228 | 1.072 | 1.408 | GEN | GEN | 0.0031 | 0.00364 | 0.0353 | AA | 101 | 508 |
| | | | | | | | | HOM | | | | | | | |
| rs3820059 | C1orf114 | ADD | A | All | 1.113 | 1.045 | 1.186 | ADD | ADD | 0.0009 | — | 0.0353 | | | |
| rs3820059 | C1orf114 | DOM | AG + AA | All | 1.149 | 1.053 | 1.255 | DOM | DOM | 0.0019 | — | 0.0353 | AG + AA | 349 | 2141 |
| rs3820059 | C1orf114 | REC | AA | All | 1.155 | 1.017 | 1.313 | REC | REC | 0.0264 | — | 0.0353 | AA | 101 | 508 |
| rs6025 | F5 | GEN | AG | All | 3.567 | 3.047 | 4.176 | GEN | GEN | <.0001 | 0 | 0.0475 | AG | 127 | 580 |
| | | | | | | | | HET | | | | | | | |
| rs6025 | F5 | GEN | AA | All | 5.412 | 2.353 | 12.446 | GEN | GEN | <.0001 | 0 | 0.0475 | AA | 7 | 27 |
| | | | | | | | | HOM | | | | | | | |
| rs6025 | F5 | ADD | A | All | 3.423 | 2.944 | 3.98 | ADD | ADD | <.0001 | — | 0.0475 | | | |
| rs6025 | F5 | DOM | AG + AA | All | 3.62 | 3.1 | 4.228 | DOM | DOM | <.0001 | — | 0.0475 | AG + AA | 134 | 607 |
| rs6025 | F5 | REC | AA | All | 4.768 | 2.074 | 10.963 | REC | REC | 0.0002 | — | 0.0475 | AA | 7 | 27 |
| rs4262503 | LOC730144/ | GEN | CT | All | 0.817 | 0.718 | 0.928 | GEN | GEN | 0.0019 | 0.00294 | 0.258 | CT | 73 | 437 |
| | LOC100505872 | | | | | | | HET | | | | | | | |
| rs4262503 | LOC730144/ | GEN | CC | All | 1.468 | 0.834 | 2.582 | GEN | GEN | 0.1832 | 0.00294 | 0.258 | CC | 8 | 27 |
| | LOC100505872 | | | | | | | HOM | | | | | | | |
| rs4262503 | LOC730144/ | ADD | C | All | 0.87 | 0.774 | 0.979 | ADD | ADD | 0.0209 | — | 0.258 | | | |
| | LOC100505872 | | | | | | | | | | | | | | |
| rs4262503 | LOC730144/ | DOM | CT + CC | All | 0.837 | 0.739 | 0.949 | DOM | DOM | 0.0055 | — | 0.258 | CT + CC | 81 | 464 |
| | LOC100505872 | | | | | | | | | | | | | | |
| rs4262503 | LOC730144/ | REC | CC | All | 1.508 | 0.858 | 2.653 | REC | REC | 0.1537 | — | 0.258 | CC | 8 | 27 |
| | LOC100505872 | | | | | | | | | | | | | | |
| rs627530 | STK11IP/OBSL1 | GEN | CT | All | 1.094 | 0.924 | 1.295 | GEN | GEN | 0.2963 | 0.00378 | 3.57E−11 | CT | 44 | 260 |
| | | | | | | | | HET | | | | | | | |
| rs627530 | STK11IP/OBSL1 | GEN | CC | All | 2.998 | 1.527 | 5.885 | GEN | GEN | 0.0014 | 0.00378 | 3.57E−11 | CC | 8 | 26 |
| | | | | | | | | HOM | | | | | | | |
| rs627530 | STK11IP/OBSL1 | ADD | C | All | 1.207 | 1.04 | 1.401 | ADD | ADD | 0.0133 | — | 3.57E−11 | | | |
| rs627530 | STK11IP/OBSL1 | DOM | CT + CC | All | 1.165 | 0.99 | 1.372 | DOM | DOM | 0.0667 | — | 3.57E−11 | CT + CC | 52 | 286 |
| rs627530 | STK11IP/OBSL1 | REC | CC | All | 2.979 | 1.518 | 5.847 | REC | REC | 0.0015 | — | 3.57E−11 | CC | 8 | 26 |
| rs1800788 | | GEN | TC | All | 1.231 | 1.121 | 1.351 | GEN | GEN | <.0001 | 0.00001 | 0.0217 | TC | 199 | 1284 |
| | | | | | | | | HET | | | | | | | |
| rs1800788 | | GEN | TT | All | 1.307 | 1.076 | 1.589 | GEN | GEN | 0.007 | 0.00001 | 0.0217 | TT | 48 | 207 |
| | | | | | | | | HOM | | | | | | | |
| rs1800788 | | ADD | T | All | 1.189 | 1.105 | 1.278 | ADD | ADD | <.0001 | — | 0.0217 | | | |
| rs1800788 | | DOM | TC + TT | All | 1.241 | 1.135 | 1.356 | DOM | DOM | <.0001 | — | 0.217 | TC + TT | 247 | 1491 |
| rs1800788 | | REC | TT | All | 1.214 | 1.002 | 1.471 | REC | REC | 0.048 | — | 0.0217 | TT | 48 | 207 |
| rs2066865 | FGG | GEN | AG | All | 1.327 | 1.21 | 1.456 | GEN | GEN | <.0001 | 0 | 0.97 | AG | 229 | 1528 |
| | | | | | | | | HET | | | | | | | |
| rs2066865 | FGG | GEN | AA | All | 1.939 | 1.655 | 2.271 | GEN | GEN | <.0001 | 0 | 0.97 | AA | 85 | 406 |
| | | | | | | | | HOM | | | | | | | |
| rs2066865 | FGG | ADD | A | All | 1.366 | 1.277 | 1.462 | ADD | ADD | <.0001 | — | 0.97 | | | |
| rs2066865 | FGG | DOM | AG + AA | All | 1.421 | 1.302 | 1.551 | DOM | DOM | <.0001 | — | 0.97 | AG + AA | 314 | 1934 |
| rs2066865 | FGG | REC | AA | All | 1.704 | 1.464 | 1.985 | REC | REC | <.0001 | — | 0.97 | AA | 85 | 406 |
| rs2066854 | FGG | GEN | AT | All | 1.314 | 1.199 | 1.441 | GEN | GEN | <.0001 | 0 | 0.849 | AT | 228 | 1537 |
| | | | | | | | | HET | | | | | | | |
| rs2066854 | FGG | GEN | AA | All | 1.927 | 1.647 | 2.254 | GEN | GEN | <.0001 | 0 | 0.849 | AA | 87 | 415 |
| | | | | | | | | HOM | | | | | | | |
| rs2066854 | FGG | ADD | A | All | 1.359 | 1.271 | 1.453 | ADD | ADD | <.0001 | — | 0.849 | | | |
| rs2066854 | FGG | DOM | AT + AA | All | 1.41 | 1.292 | 1.538 | DOM | DOM | <.0001 | — | 0.849 | AT + AA | 315 | 1952 |
| rs2066854 | FGG | REC | AA | All | 1.702 | 1.463 | 1.979 | REC | REC | <.0001 | — | 0.849 | AA | 87 | 415 |
| rs3756008 | | GEN | TA | All | 1.349 | 1.222 | 1.489 | GEN | GEN | <.0001 | 0 | 0.644 | TA | 257 | 1751 |
| | | | | | | | | HET | | | | | | | |
| rs3756008 | | GEN | TT | All | 1.721 | 1.517 | 1.952 | GEN | GEN | <.0001 | 0 | 0.644 | TT | 137 | 774 |
| | | | | | | | | HOM | | | | | | | |
| rs3756008 | | ADD | T | All | 1.317 | 1.238 | 1.401 | ADD | ADD | <.0001 | — | 0.644 | | | |
| rs3756008 | | DOM | TA + TT | All | 1.444 | 1.316 | 1.585 | DOM | DOM | <.0001 | — | 0.644 | TA + TT | 394 | 2525 |
| rs3756008 | | REC | TT | All | 1.44 | 1.288 | 1.609 | REC | REC | <.0001 | — | 0.644 | TT | 137 | 774 |
| rs925451 | F11 | GEN | AG | All | 1.36 | 1.233 | 1.5 | GEN | GEN | <.0001 | 0 | 0.0947 | AG | 259 | 1719 |
| | | | | | | | | HET | | | | | | | |
| rs925451 | F11 | GEN | AA | All | 1.747 | 1.537 | 1.985 | GEN | GEN | <.0001 | 0 | 0.0947 | AA | 129 | 725 |
| | | | | | | | | HOM | | | | | | | |
| rs925451 | F11 | ADD | A | All | 1.328 | 1.248 | 1.413 | ADD | ADD | <.0001 | — | 0.0947 | | | |
| rs925451 | F11 | DOM | AG + AA | All | 1.455 | 1.327 | 1.596 | DOM | DOM | <.0001 | — | 0.0947 | AG + AA | 388 | 2444 |
| rs925451 | F11 | REC | AA | All | 1.462 | 1.304 | 1.64 | REC | REC | <.0001 | — | 0.0947 | AA | 129 | 725 |
| rs3822057 | F11 | GEN | AC | All | 0.785 | 0.707 | 0.871 | GEN | GEN | <.0001 | 0 | 0.514 | AC | 269 | 1740 |
| | | | | | | | | HET | | | | | | | |
| rs3822057 | F11 | GEN | AA | All | 0.6 | 0.53 | 0.679 | GEN | GEN | <.0001 | 0 | 0.514 | AA | 86 | 734 |
| | | | | | | | | HOM | | | | | | | |
| rs3822057 | F11 | ADD | A | All | 0.775 | 0.729 | 0.824 | ADD | ADD | <.0001 | — | 0.514 | | | |
| rs3822057 | F11 | DOM | AC + AA | All | 0.72 | 0.652 | 0.794 | DOM | DOM | <.0001 | — | 0.514 | AC + AA | 355 | 2474 |
| rs3822057 | F11 | REC | AA | All | 0.703 | 0.633 | 0.779 | REC | REC | <.0001 | — | 0.514 | AA | 86 | 734 |
| rs2036914 | F11 | GEN | TC | All | 0.755 | 0.683 | 0.835 | GEN | GEN | <.0001 | 0 | 0.476 | TC | 262 | 1684 |
| | | | | | | | | HET | | | | | | | |
| rs2036914 | F11 | GEN | TT | All | 0.586 | 0.517 | 0.664 | GEN | GEN | <.0001 | 0 | 0.476 | TT | 77 | 631 |
| | | | | | | | | HOM | | | | | | | |
| rs2036914 | F11 | ADD | T | All | 0.764 | 0.719 | 0.813 | ADD | ADD | <.0001 | — | 0.476 | | | |
| rs2036914 | F11 | DOM | TC + TT | All | 0.701 | 0.638 | 0.77 | DOM | DOM | <.0001 | — | 0.476 | TC + TT | 339 | 2315 |
| rs2036914 | F11 | REC | TT | All | 0.696 | 0.624 | 0.776 | REC | REC | <.0001 | — | 0.476 | TT | 77 | 631 |
| rs3756011 | F11 | GEN | AC | All | 1.347 | 1.218 | 1.489 | GEN | GEN | <.0001 | 0 | 0.391 | AC | 258 | 1730 |
| | | | | | | | | HET | | | | | | | |
| rs3756011 | F11 | GEN | AA | All | 1.775 | 1.566 | 2.011 | GEN | GEN | <.0001 | 0 | 0.391 | AA | 147 | 827 |
| | | | | | | | | HOM | | | | | | | |
| rs3756011 | F11 | ADD | A | All | 1.334 | 1.254 | 1.419 | ADD | ADD | <.0001 | — | 0.391 | | | |
| rs3756011 | F11 | DOM | AC + AA | All | 1.459 | 1.328 | 1.604 | DOM | DOM | <.0001 | — | 0.391 | AC + AA | 405 | 2557 |
| rs3756011 | F11 | REC | AA | All | 1.482 | 1.329 | 1.653 | REC | REC | <.0001 | — | 0.391 | AA | 147 | 827 |
| rs2289252 | F11 | GEN | TC | All | 1.381 | 1.249 | 1.527 | GEN | GEN | <.0001 | 0 | 0.817 | TC | 257 | 1739 |
| | | | | | | | | HET | | | | | | | |
| rs2289252 | F11 | GEN | TT | All | 1.807 | 1.593 | 2.049 | GEN | GEN | <.0001 | 0 | 0.817 | TT | 144 | 814 |
| | | | | | | | | HOM | | | | | | | |
| rs2289252 | F11 | ADD | T | All | 1.348 | 1.267 | 1.435 | ADD | ADD | <.0001 | — | 0.817 | | | |
| rs2289252 | F11 | DOM | TC + TT | All | 1.492 | 1.357 | 1.64 | DOM | DOM | <.0001 | — | 0.817 | TC + TT | 401 | 2553 |
| rs2289252 | F11 | REC | TT | All | 1.485 | 1.331 | 1.657 | REC | REC | <.0001 | — | 0.817 | TT | 144 | 814 |
| rs2281390 | LOC642074/ | GEN | TG | All | 1.132 | 1.028 | 1.245 | GEN | GEN | 0.0113 | 0.02735 | 0.0129 | TG | 154 | 1100 |
| | LOC642043 | | | | | | | HET | | | | | | | |
| rs2281390 | LOC642074/ | GEN | TT | All | 0.931 | 0.729 | 1.187 | GEN | GEN | 0.5621 | 0.02735 | 0.0129 | TT | 27 | 112 |
| | LOC642043 | | | | | | | HOM | | | | | | | |
| rs2281390 | LOC642074/ | ADD | T | All | 1.067 | 0.986 | 1.155 | ADD | ADD | 0.1086 | — | 0.0129 | | | |
| | LOC642043 | | | | | | | | | | | | | | |
| rs2281390 | LOC642074/ | DOM | TG + TT | All | 1.109 | 1.011 | 1.216 | DOM | DOM | 0.0277 | — | 0.0129 | TG + TT | 181 | 1212 |
| | LOC642043 | | | | | | | | | | | | | | |
| rs2281390 | LOC642074/ | REC | TT | All | 0.898 | 0.705 | 1.143 | REC | REC | 0.382 | — | 0.0129 | TT | 27 | 112 |
| | LOC642043 | | | | | | | | | | | | | | |
| rs2274736 | PTPN21 | GEN | GA | All | 1.098 | 1 | 1.204 | GEN | GEN | 0.0489 | 0.02063 | 0.455 | GA | 245 | 1597 |
| | | | | | | | | HET | | | | | | | |
| rs2274736 | PTPN21 | GEN | GG | All | 1.207 | 1.041 | 1.399 | GEN | GEN | 0.0126 | 0.02063 | 0.455 | GG | 77 | 402 |
| | | | | | | | | HOM | | | | | | | |
| rs2274736 | PTPN21 | ADD | G | All | 1.098 | 1.028 | 1.173 | ADD | ADD | 0.0053 | — | 0.455 | | | |
| rs2274736 | PTPN21 | DOM | GA + GG | All | 1.118 | 1.024 | 1.221 | DOM | DOM | 0.013 | — | 0.455 | GA + GG | 322 | 1999 |
| rs2274736 | PTPN21 | REC | GG | All | 1.151 | 1.001 | 1.324 | REC | REC | 0.0485 | — | 0.455 | GG | 77 | 402 |
| rs2266911 | STAG2/ODZ1 | GEN | TC | Female | 0.928 | 0.815 | 1.057 | GEN | GEN | 0.2614 | 0.50818 | | TC | 5 | 13 |
| | | | | adj age | | | | HET | | | | | | | |
| rs2266911 | STAG2/ODZ1 | GEN | TT | Female | 0.931 | 0.687 | 1.263 | GEN | GEN | 0.647 | 0.50818 | | TT | 67 | 261 |
| | | | | adj age | | | | HOM | | | | | | | |
| rs2266911 | STAG2/ODZ1 | ADD | T | Female | 0.943 | 0.848 | 1.048 | ADD | ADD | 0.2766 | — | | | | |
| | | | | adj age | | | | | | | | | | | |
| rs2266911 | STAG2/ODZ1 | DOM | TC + TT | Female | 0.928 | 0.819 | 1.052 | DOM | DOM | 0.2447 | — | | TC + TT | 72 | 274 |
| | | | | adj age | | | | | | | | | | | |
| rs2266911 | STAG2/ODZ1 | REC | TT | Female | 0.954 | 0.706 | 1.291 | REC | REC | 0.7616 | — | | TT | 67 | 261 |
| | | | | adj age | | | | | | | | | | | |
| rs3765407 | LUZP1 | GEN | GT | All | 0.958 | 0.869 | 1.055 | GEN | GEN | 0.3815 | 0.01959 | 0.338 | GT | 165 | 981 |
| | | | | | | | | HET | | | | | | | |
| rs3765407 | LUZP1 | GEN | GG | All | 1.392 | 1.08 | 1.794 | GEN | GEN | 0.0106 | 0.01959 | 0.338 | GG | 18 | 128 |
| | | | | | | | | HOM | | | | | | | |
| rs3765407 | LUZP1 | ADD | G | All | 1.031 | 0.951 | 1.118 | ADD | ADD | 0.4595 | — | 0.338 | | | |
| rs3765407 | LUZP1 | DOM | GT + GG | All | 0.994 | 0.905 | 1.091 | DOM | DOM | 0.8922 | — | 0.338 | GT + GG | 183 | 1109 |
| rs3765407 | LUZP1 | REC | GG | All | 1.409 | 1.095 | 1.814 | REC | REC | 0.0077 | — | 0.338 | GG | 18 | 128 |
| rs4524 | F5 | GEN | CT | All | 0.77 | 0.701 | 0.844 | GEN | GEN | <.0001 | 0 | 0.3 | CT | 159 | 1185 |
| | | | | | | | | HET | | | | | | | |
| rs4524 | F5 | GEN | CC | All | 0.613 | 0.507 | 0.741 | GEN | GEN | <.0001 | 0 | 0.3 | CC | 28 | 175 |
| | | | | | | | | HOM | | | | | | | |
| rs4524 | F5 | ADD | C | All | 0.776 | 0.722 | 0.834 | ADD | ADD | <.0001 | — | 0.3 | | | |
| rs4524 | F5 | DOM | CT + CC | All | 0.745 | 0.682 | 0.814 | DOM | DOM | <.0001 | — | 0.3 | CT + CC | 187 | 1360 |
| rs4524 | F5 | REC | CC | All | 0.677 | 0.562 | 0.816 | REC | REC | <.0001 | — | 0.3 | CC | 28 | 175 |
| rs2070006 | | GEN | TC | All | 1.271 | 1.152 | 1.402 | GEN | GEN | <.0001 | 0 | 0.251 | TC | 265 | 1756 |
| | | | | | | | | HET | | | | | | | |
| rs2070006 | | GEN | TT | All | 1.531 | 1.348 | 1.738 | GEN | GEN | <.0001 | 0 | 0.251 | TT | 124 | 720 |
| | | | | | | | | HOM | | | | | | | |
| rs2070006 | | ADD | T | All | 1.242 | 1.167 | 1.322 | ADD | ADD | <.0001 | — | 0.251 | | | |
| rs2070006 | | DOM | TC + TT | All | 1.337 | 1.219 | 1.467 | DOM | DOM | <.0001 | — | 0.251 | TC + TT | 389 | 2476 |
| rs2070006 | | REC | TT | All | 1.329 | 1.187 | 1.487 | REC | REC | <.0001 | — | 0.251 | TT | 124 | 720 |
| rs4253418 | F11 | GEN | AG | All | 0.773 | 0.653 | 0.915 | GEN | GEN | 0.0028 | 0.01096 | 0.0809 | AG | 33 | 233 |
| | | | | | | | | HET | | | | | | | |
| rs4253418 | F11 | GEN | AA | All | 0.87 | 0.349 | 2.165 | GEN | GEN | 0.7643 | 0.01096 | 0.0809 | AA | 3 | 8 |
| | | | | | | | | HOM | | | | | | | |
| rs4253418 | F11 | ADD | A | All | 0.789 | 0.673 | 0.926 | ADD | ADD | 0.0036 | — | 0.0809 | | | |
| rs4253418 | F11 | DOM | AG + AA | All | 0.776 | 0.657 | 0.916 | DOM | DOM | 0.0027 | — | 0.0809 | AG + AA | 36 | 241 |
| rs4253418 | F11 | REC | AA | All | 0.887 | 0.356 | 2.208 | REC | REC | 0.7968 | — | 0.0809 | AA | 3 | 8 |
| rs169713 | | GEN | CT | All | 1.145 | 1.042 | 1.258 | GEN | GEN | 0.0048 | 0.01464 | 0.0383 | CT | 165 | 1186 |
| | | | | | | | | HET | | | | | | | |
| rs169713 | | GEN | CC | All | 1.129 | 0.917 | 1.389 | GEN | GEN | 0.2521 | 0.01464 | 0.0383 | CC | 29 | 171 |
| | | | | | | | | HOM | | | | | | | |
| rs169713 | | ADD | C | All | 1.108 | 1.028 | 1.194 | ADD | ADD | 0.0075 | — | 0.0383 | | | |
| rs169713 | | DOM | CT + CC | All | 1.143 | 1.044 | 1.251 | DOM | DOM | 0.0037 | — | 0.0383 | CT + CC | 194 | 1357 |
| rs169713 | | REC | CC | All | 1.078 | 0.878 | 1.323 | REC | REC | 0.4732 | — | 0.0383 | CC | 29 | 171 |
| rs8176750 | ABO | GEN | AC | All | 0.93 | 0.815 | 1.061 | GEN | GEN | 0.281 | 0.47492 | 1 | AC | 62 | 425 |
| | | | | | | | | HET | | | | | | | |
| rs8176750 | ABO | GEN | AA | All | 0.813 | 0.413 | 1.602 | GEN | GEN | 0.55 | 0.47492 | 1 | AA | 4 | 14 |
| | | | | | | | | HOM | | | | | | | |
| rs8176750 | ABO | ADD | A | All | 0.926 | 0.818 | 1.049 | ADD | ADD | 0.2264 | — | 1 | | | |
| rs8176750 | ABO | DOM | AC + AA | All | 0.926 | 0.813 | 1.055 | DOM | DOM | 0.2462 | — | 1 | AC + AA | 66 | 439 |
| rs8176750 | ABO | REC | AA | All | 0.821 | 0.417 | 1.616 | REC | REC | 0.5677 | — | 1 | AA | 4 | 14 |
| rs8176750 | ABO | GEN | AC | age sex | 0.659 | 0.574 | 0.757 | GEN | GEN | <.0001 | 1.032E−08 | | AC | 61 | 421 |
| | | | | among | | | | HET | | | | | | | |
| | | | | Dom | | | | | | | | | | | |
| | | | | (GG or GT) | | | | | | | | | | | |
| | | | | of | | | | | | | | | | | |
| | | | | rs8176719 | | | | | | | | | | | |
| rs8176750 | ABO | GEN | AA | age sex | 0.582 | 0.295 | 1.148 | GEN | GEN | 0.1183 | 1.032E−08 | | AA | 4 | 14 |
| | | | | among | | | | HOM | | | | | | | |
| | | | | Dom | | | | | | | | | | | |
| | | | | (GG or GT) | | | | | | | | | | | |
| | | | | of | | | | | | | | | | | |
| | | | | rs8176719 | | | | | | | | | | | |
| rs8176750 | ABO | ADD | A | age sex | 0.672 | 0.59 | 0.765 | ADD | ADD | <.0001 | — | | | | |
| | | | | among | | | | | | | | | | | |
| | | | | Dom | | | | | | | | | | | |
| | | | | (GG or GT) | | | | | | | | | | | |
| | | | | of | | | | | | | | | | | |
| | | | | rs8176719 | | | | | | | | | | | |
| rs8176750 | ABO | DOM | AC + AA | age sex | 0.657 | 0.573 | 0.752 | DOM | DOM | <.0001 | — | | AC + AA | 65 | 435 |
| | | | | among | | | | | | | | | | | |
| | | | | Dom | | | | | | | | | | | |
| | | | | (GG or GT) | | | | | | | | | | | |
| | | | | of | | | | | | | | | | | |
| | | | | rs8176719 | | | | | | | | | | | |
| rs8176750 | ABO | REC | AA | age sex | 0.632 | 0.321 | 1.246 | REC | REC | 0.1851 | — | | AA | 4 | 14 |
| | | | | among | | | | | | | | | | | |
| | | | | Dom | | | | | | | | | | | |
| | | | | (GG or GT) | | | | | | | | | | | |
| | | | | of | | | | | | | | | | | |
| | | | | rs8176719 | | | | | | | | | | | |
| rs8176719 | ABO | GEN | GT | All | 2.023 | 1.833 | 2.232 | GEN | GEN | <.0001 | 0 | 0.156 | GT | 301 | 1928 |
| | | | | | | | | HET | | | | | | | |
| rs8176719 | ABO | GEN | GG | All | 2.491 | 2.174 | 2.853 | GEN | GEN | <.0001 | 0 | 0.156 | GG | 111 | 642 |
| | | | | | | | | HOM | | | | | | | |
| rs8176719 | ABO | ADD | G | All | 1.662 | 1.556 | 1.774 | ADD | ADD | <.0001 | — | 0.156 | | | |
| rs8176719 | ABO | DOM | GT + GG | All | 2.124 | 1.934 | 2.333 | DOM | DOM | <.0001 | — | 0.156 | GT + GG | 412 | 2570 |
| rs8176719 | ABO | REC | GG | All | 1.646 | 1.457 | 1.86 | REC | REC | <.0001 | — | 0.156 | GG | 111 | 642 |
| rs2069946 | PROCR | GEN | CT | All | 1.304 | 1.133 | 1.5 | GEN | GEN | 0.0002 | 0.00076 | 0.131 | CT | 55 | 429 |
| | | | | | | | | HET | | | | | | | |
| rs2069946 | PROCR | GEN | CC | All | 1.344 | 0.691 | 2.613 | GEN | GEN | 0.3835 | 0.00076 | 0.131 | CC | 1 | 16 |
| | | | | | | | | HOM | | | | | | | |
| rs2069946 | PROCR | ADD | C | All | 1.282 | 1.125 | 1.46 | ADD | ADD | 0.0002 | — | 0.131 | | | |
| rs2069946 | PROCR | DOM | CT + CC | All | 1.305 | 1.137 | 1.498 | DOM | DOM | 0.0002 | — | 0.131 | CT + CC | 56 | 445 |
| rs2069946 | PROCR | REC | CC | All | 1.305 | 0.672 | 2.538 | REC | REC | 0.4319 | — | 0.131 | CC | 1 | 16 |
| rs2266911 | STAG2/ODZ1 | GEN | TC | male age | 2.868 | 1.089 | 7.553 | GEN | GEN | 0.0329 | 0.00558 | | TC | 51 | 590 |
| | | | | among | | | | HET | | | | | | | |
| rs2266911 | STAG2/ODZ1 | GEN | TT | male age | 0.815 | 0.688 | 0.967 | GEN | GEN | 0.0189 | 0.00558 | | TT | 4 | 77 |
| | | | | among | | | | HOM | | | | | | | |
| rs2266911 | STAG2/ODZ1 | ADD | T | male age | 0.909 | 0.835 | 0.99 | ADD | ADD | 0.0276 | — | | | | |
| | | | | among | | | | | | | | | | | |
| rs2266911 | STAG2/ODZ1 | DOM | TC + TT | male age | 0.845 | 0.714 | 0.999 | DOM | DOM | 0.0493 | — | | TC + TT | 55 | 667 |
| | | | | among | | | | | | | | | | | |
| rs2266911 | STAG2/ODZ1 | REC | TT | male age | 0.81 | 0.683 | 0.961 | REC | REC | 0.0154 | — | | TT | 4 | 77 |
| | | | | among | | | | | | | | | | | |
| rs6003 | F13B | GEN | GA | All | 1.181 | 1.049 | 1.33 | GEN | GEN | 0.0059 | 0.0099 | 0.00061 | GA | 94 | 605 |
| | | | | | | | | HET | | | | | | | |
| rs6003 | F13B | GEN | GG | All | 1.315 | 0.904 | 1.914 | GEN | GEN | 0.1523 | 0.0099 | 0.00061 | GG | 12 | 53 |
| | | | | | | | | HOM | | | | | | | |
| rs6003 | F13B | ADD | G | All | 1.172 | 1.057 | 1.298 | ADD | ADD | 0.0025 | — | 0.00061 | | | |
| rs6003 | F13B | DOM | GA + GG | All | 1.191 | 1.062 | 1.335 | DOM | DOM | 0.0028 | — | 0.00061 | GA + GG | 106 | 658 |
| rs6003 | F13B | REC | GG | All | 1.279 | 0.88 | 1.861 | REC | REC | 0.1976 | — | 0.00061 | GG | 12 | 53 |
| rs1417121 | SDCCAG8/ | GEN | CG | All | 1.072 | 0.978 | 1.175 | GEN | GEN | 0.1388 | 0.00001 | 0.795 | CG | 219 | 1447 |
| | AKT3 | | | | | | | HET | | | | | | | |
| rs1417121 | SDCCAG8/ | GEN | CC | All | 1.47 | 1.256 | 1.72 | GEN | GEN | <.0001 | 0.00001 | 0.795 | CC | 64 | 377 |
| | AKT3 | | | | | | | HOM | | | | | | | |
| rs1417121 | SDCCAG8/ | ADD | C | All | 1.155 | 1.08 | 1.235 | ADD | ADD | <.0001 | — | 0.795 | | | |
| | AKT3 | | | | | | | | | | | | | | |
| rs1417121 | SDCCAG8/ | DOM | CG + CC | All | 1.135 | 1.041 | 1.239 | DOM | DOM | 0.0043 | — | 0.795 | CG + CC | 283 | 1824 |
| | AKT3 | | | | | | | | | | | | | | |
| rs1417121 | SDCCAG8/ | REC | CC | All | 1.425 | 1.224 | 1.659 | REC | REC | <.0001 | — | 0.795 | CC | 64 | 377 |
| | AKT3 | | | | | | | | | | | | | | |
| rs12744297 | AKT3 | GEN | GA | All | 1.107 | 1.009 | 1.215 | GEN | GEN | 0.0324 | 0.00055 | 0.14 | GA | 259 | 1577 |
| | | | | | | | | HET | | | | | | | |
| rs12744297 | AKT3 | GEN | GG | All | 1.311 | 1.138 | 1.511 | GEN | GEN | 0.0002 | 0.00055 | 0.14 | GG | 59 | 469 |
| | | | | | | | | HOM | | | | | | | |
| rs12744297 | AKT3 | ADD | G | All | 1.133 | 1.063 | 1.209 | ADD | ADD | 0.0001 | — | 0.14 | | | |
| rs12744297 | AKT3 | DOM | GA + GG | All | 1.148 | 1.051 | 1.253 | DOM | DOM | 0.0021 | — | 0.14 | GA + GG | 318 | 2046 |
| rs12744297 | AKT3 | REC | GG | All | 1.246 | 1.09 | 1.424 | REC | REC | 0.0012 | — | 0.14 | GG | 59 | 469 |
| rs3733402 | KLKB1 | GEN | GA | All | 0.798 | 0.721 | 0.883 | GEN | GEN | <.0001 | 0 | 0.592 | GA | 252 | 1736 |
| | | | | | | | | HET | | | | | | | |
| rs3733402 | KLKB1 | GEN | GG | All | 0.674 | 0.595 | 0.763 | GEN | GEN | <.0001 | 0 | 0.592 | GG | 97 | 685 |
| | | | | | | | | HOM | | | | | | | |
| rs3733402 | KLKB1 | ADD | G | All | 0.819 | 0.77 | 0.871 | ADD | ADD | <.0001 | — | 0.592 | | | |
| rs3733402 | KLKB1 | DOM | GA + GG | All | 0.758 | 0.689 | 0.835 | DOM | DOM | <.0001 | — | 0.592 | GA + GG | 349 | 2421 |
| rs3733402 | KLKB1 | REC | GG | All | 0.777 | 0.698 | 0.865 | REC | REC | <.0001 | — | 0.592 | GG | 97 | 685 |
| rs3087505 | KLKB1 | GEN | AG | All | 0.85 | 0.758 | 0.952 | GEN | GEN | 0.005 | 0.0001 | 0.00568 | AG | 84 | 595 |
| | | | | | | | | HET | | | | | | | |
| rs3087505 | KLKB1 | GEN | AA | All | 0.483 | 0.317 | 0.736 | GEN | GEN | 0.0007 | 0.0001 | 0.00568 | AA | 7 | 31 |
| | | | | | | | | HOM | | | | | | | |
| rs3087505 | KLKB1 | ADD | A | All | 0.812 | 0.734 | 0.898 | ADD | ADD | <.0001 | — | 0.00568 | | | |
| rs3087505 | KLKB1 | DOM | AG + AA | All | 0.82 | 0.734 | 0.916 | DOM | DOM | 0.0005 | — | 0.00568 | AG + AA | 91 | 626 |
| rs3087505 | KLKB1 | REC | AA | All | 0.498 | 0.327 | 0.757 | REC | REC | 0.0011 | — | 0.00568 | AA | 7 | 31 |
| rs2480089 | KIF6 | GEN | CA | All | 0.89 | 0.811 | 0.976 | GEN | GEN | 0.0135 | 0.01339 | 0.0209 | CA | 236 | 1500 |
| | | | | | | | | HET | | | | | | | |
| rs2480089 | KIF6 | GEN | CC | All | 1.054 | 0.912 | 1.217 | GEN | GEN | 0.4768 | 0.01339 | 0.0209 | CC | 71 | 424 |
| | | | | | | | | HOM | | | | | | | |
| rs2480089 | KIF6 | ADD | C | All | 0.98 | 0.918 | 1.046 | ADD | ADD | 0.5491 | — | 0.0209 | | | |
| rs2480089 | KIF6 | DOM | CA + CC | All | 0.921 | 0.844 | 1.006 | DOM | DOM | 0.0671 | — | 0.0209 | CA + CC | 307 | 1924 |
| rs2480089 | KIF6 | REC | CC | All | 1.117 | 0.975 | 1.281 | REC | REC | 0.1111 | — | 0.0209 | CC | 71 | 424 |
| rs8176750 | ABO | GEN | AC | age sex | 0.659 | 0.574 | 0.757 | GEN | GEN | <.0001 | 1.032E−08 | | AC | 61 | 421 |
| | | | | among | | | | HET | | | | | | | |
| | | | | Dom | | | | | | | | | | | |
| | | | | (GG or GT) | | | | | | | | | | | |
| | | | | of | | | | | | | | | | | |
| | | | | rs8176719 | | | | | | | | | | | |
| rs8176750 | ABO | GEN | AA | age sex | 0.582 | 0.295 | 1.148 | GEN | GEN | 0.1183 | 1.032E−08 | | AA | 4 | 14 |
| | | | | among | | | | HOM | | | | | | | |
| | | | | Dom | | | | | | | | | | | |
| | | | | (GG or GT) | | | | | | | | | | | |
| | | | | of | | | | | | | | | | | |
| | | | | rs8176719 | | | | | | | | | | | |
| rs8176750 | ABO | ADD | A | age sex | 0.672 | 0.59 | 0.765 | ADD | ADD | <.0001 | — | | | | |
| | | | | among | | | | | | | | | | | |
| | | | | Dom | | | | | | | | | | | |
| | | | | (GG or GT) | | | | | | | | | | | |
| | | | | of | | | | | | | | | | | |
| | | | | rs8176719 | | | | | | | | | | | |
| rs8176750 | ABO | DOM | AC + AA | age sex | 0.657 | 0.573 | 0.752 | DOM | DOM | <.0001 | — | | AC + AA | 65 | 435 |
| | | | | among | | | | | | | | | | | |
| | | | | Dom | | | | | | | | | | | |
| | | | | (GG or GT) | | | | | | | | | | | |
| | | | | of | | | | | | | | | | | |
| | | | | rs8176719 | | | | | | | | | | | |
| rs8176750 | ABO | REC | AA | age sex | 0.632 | 0.321 | 1.246 | REC | REC | 0.1851 | — | | AA | 4 | 14 |
| | | | | among | | | | | | | | | | | |
| | | | | Dom | | | | | | | | | | | |
| | | | | (GG or GT) | | | | | | | | | | | |
| | | | | of | | | | | | | | | | | |
| | | | | rs8176719 | | | | | | | | | | | |
| rs8176719 | ABO | GEN | GT | All | 2.023 | 1.833 | 2.232 | GEN | GEN | <.0001 | 0 | 0.156 | GT | 301 | 1928 |
| | | | | | | | | HET | | | | | | | |
| rs8176719 | ABO | GEN | GG | All | 2.491 | 2.174 | 2.853 | GEN | GEN | <.0001 | 0 | 0.156 | GG | 111 | 642 |
| | | | | | | | | HOM | | | | | | | |
| rs8176719 | ABO | ADD | G | All | 1.662 | 1.556 | 1.774 | ADD | ADD | <.0001 | — | 0.156 | | | |
| rs8176719 | ABO | DOM | GT + GG | All | 2.124 | 1.934 | 2.333 | DOM | DOM | <.0001 | — | 0.156 | GT + GG | 412 | 2570 |
| rs8176719 | ABO | REC | GG | All | 1.646 | 1.457 | 1.86 | REC | REC | <.0001 | — | 0.156 | GG | 111 | 642 |
| rs3730055 | AKT2 | GEN | TC | All | 0.981 | 0.868 | 1.11 | GEN | GEN | 0.7646 | 0.03411 | 0.766 | TC | 86 | 516 |
| | | | | | | | | HET | | | | | | | |
| rs3730055 | AKT2 | GEN | TT | All | 1.878 | 1.161 | 3.037 | GEN | GEN | 0.0102 | 0.03411 | 0.766 | TT | 6 | 42 |
| | | | | | | | | HOM | | | | | | | |
| rs3730055 | AKT2 | ADD | T | All | 1.05 | 0.94 | 1.173 | ADD | ADD | 0.387 | — | 0.766 | | | |
| rs3730055 | AKT2 | DOM | TC + TT | All | 1.017 | 0.902 | 1.146 | DOM | DOM | 0.7853 | — | 0.766 | TC + TT | 92 | 558 |
| rs3730055 | AKT2 | REC | TT | All | 1.883 | 1.165 | 3.044 | REC | REC | 0.0098 | — | 0.766 | TT | 6 | 42 |
| rs2304167 | GP6 | GEN | CT | All | 0.907 | 0.825 | 0.997 | GEN | GEN | 0.0442 | 0.04653 | 0.744 | CT | 176 | 1065 |
| | | | | | | | | HET | | | | | | | |
| rs2304167 | GP6 | GEN | CC | All | 0.818 | 0.648 | 1.032 | GEN | GEN | 0.0901 | 0.04653 | 0.744 | CC | 20 | 123 |
| | | | | | | | | HOM | | | | | | | |
| rs2304167 | GP6 | ADD | C | All | 0.906 | 0.838 | 0.98 | ADD | ADD | 0.0133 | — | 0.744 | | | |
| rs2304167 | GP6 | DOM | CT + CC | All | 0.897 | 0.818 | 0.983 | DOM | DOM | 0.0198 | — | 0.744 | CT + CC | 196 | 1188 |
| rs2304167 | GP6 | REC | CC | All | 0.844 | 0.67 | 1.063 | REC | REC | 0.1489 | — | 0.744 | CC | 20 | 123 |
| rs1654416 | RDH13/GP6 | GEN | CT | All | 0.888 | 0.807 | 0.976 | GEN | GEN | 0.0143 | 0.01484 | 1 | CT | 172 | 1042 |
| | | | | | | | | HET | | | | | | | |
| rs1654416 | RDH13/GP6 | GEN | CC | All | 0.798 | 0.629 | 1.013 | GEN | GEN | 0.0641 | 0.01484 | 1 | CC | 18 | 115 |
| | | | | | | | | HOM | | | | | | | |
| rs1654416 | RDH13/GP6 | ADD | C | All | 0.89 | 0.822 | 0.963 | ADD | ADD | 0.0037 | — | 1 | | | |
| rs1654416 | RDH13/GP6 | DOM | CT + CC | All | 0.878 | 0.801 | 0.962 | DOM | DOM | 0.0055 | — | 1 | CT + CC | 190 | 1157 |
| rs1654416 | RDH13/GP6 | REC | CC | All | 0.829 | 0.654 | 1.05 | REC | REC | 0.1203 | — | 1 | CC | 18 | 115 |

| | | Recurrent VT | | | | | | | |
|---|---|---|---|---|---|---|---|---|---|
| | | | HR 95% | HR 95% | | | | | |
| | | | CI | CI | P- | | Ref | | |
| SNP rs # | Gene | HR_ALL | lower_ALL | upper_ALL | value_ALL | P_DF2_ALL | geno | EVENTS_ALL | TOTAL_ALL |
| rs3820059 | C1orf114 | 1.11 | 0.919 | 1.335 | 0.2836 | 0.0095 | GG | 199 | 1459 |
| rs3820059 | C1orf114 | 1.45 | 1.141 | 1.843 | 0.0024 | 0.0095 | GG | 199 | 1459 |
| rs3820059 | C1orf114 | | | | | 0.0095 | GG | 199 | 1459 |
| rs3820059 | C1orf114 | 1.19 | 0.998 | 1.415 | 0.0521 | 0.0095 | GG | 199 | 1459 |
| rs3820059 | C1orf114 | 1.45 | 1.141 | 1.843 | 0.0024 | 0.0095 | GG | 199 | 1459 |
| rs6025 | F5 | 1.53 | 1.258 | 1.871 | <.0001 | <.0001 | GG | 429 | 3072 |
| rs6025 | F5 | 1.73 | 0.817 | 3.647 | 0.1522 | <.0001 | GG | 429 | 3072 |
| rs6025 | F5 | | | | | <.0001 | GG | 429 | 3072 |
| rs6025 | F5 | 1.54 | 1.27 | 1.874 | <.0001 | <.0001 | GG | 429 | 3072 |
| rs6025 | F5 | 1.73 | 0.817 | 3.647 | 0.1522 | <.0001 | GG | 429 | 3072 |
| rs4262503 | LOC730144/ | 1.14 | 0.892 | 1.462 | 0.2913 | 0.0072 | TT | 462 | 3106 |
| | LOC100505872 | | | | | | | | |
| rs4262503 | LOC730144/ | 2.93 | 1.454 | 5.891 | 0.0026 | 0.0072 | TT | 462 | 3106 |
| | LOC100505872 | | | | | | | | |
| rs4262503 | LOC730144/ | | | | | 0.0072 | TT | 462 | 3106 |
| | LOC100505872 | | | | | | | | |
| rs4262503 | LOC730144/ | 1.22 | 0.959 | 1.539 | 0.1059 | 0.0072 | TT | 462 | 3106 |
| | LOC100505872 | | | | | | | | |
| rs4262503 | LOC730144/ | 2.93 | 1.454 | 5.891 | 0.0026 | 0.0072 | TT | 462 | 3106 |
| | LOC100505872 | | | | | | | | |
| rs627530 | STK11IP/OBSL1 | 1.21 | 0.891 | 1.65 | 0.2195 | 0.0259 | TT | 510 | 3372 |
| rs627530 | STK11IP/OBSL1 | 2.4 | 1.192 | 4.831 | 0.0143 | 0.0259 | TT | 510 | 3372 |
| rs627530 | STK11IP/OBSL1 | | | | | 0.0259 | TT | 510 | 3372 |
| rs627530 | STK11IP/OBSL1 | 1.31 | 0.987 | 1.747 | 0.0615 | 0.0259 | TT | 510 | 3372 |
| rs627530 | STK11IP/OBSL1 | 2.4 | 1.192 | 4.831 | 0.0143 | 0.0259 | TT | 510 | 3372 |
| rs1800788 | | 1.09 | 0.911 | 1.306 | 0.3433 | 0.009 | CC | 293 | 2076 |
| rs1800788 | | 1.61 | 1.187 | 2.186 | 0.0022 | 0.009 | CC | 293 | 2076 |
| rs1800788 | | | | | | 0.009 | CC | 293 | 2076 |
| rs1800788 | | 1.16 | 0.983 | 1.379 | 0.0788 | 0.009 | CC | 293 | 2076 |
| rs1800788 | | 1.61 | 1.187 | 2.186 | 0.0022 | 0.009 | CC | 293 | 2076 |
| rs2066865 | FGG | 1.05 | 0.872 | 1.263 | 0.6081 | 0.0027 | GG | 221 | 1585 |
| rs2066865 | FGG | 1.53 | 1.194 | 1.971 | 0.0008 | 0.0027 | GG | 221 | 1585 |
| rs2066865 | FGG | | | | | 0.0027 | GG | 221 | 1585 |
| rs2066865 | FGG | 1.15 | 0.966 | 1.363 | 0.1174 | 0.0027 | GG | 221 | 1585 |
| rs2066865 | FGG | 1.53 | 1.194 | 1.971 | 0.0008 | 0.0027 | GG | 221 | 1585 |
| rs2066854 | FGG | 1.03 | 0.855 | 1.236 | 0.7678 | 0.002 | TT | 225 | 1607 |
| rs2066854 | FGG | 1.53 | 1.196 | 1.964 | 0.0007 | 0.002 | TT | 225 | 1607 |
| rs2066854 | FGG | | | | | 0.002 | TT | 225 | 1607 |
| rs2066854 | FGG | 1.13 | 0.953 | 1.342 | 0.1595 | 0.002 | TT | 225 | 1607 |
| rs2066854 | FGG | 1.53 | 1.196 | 1.964 | 0.0007 | 0.002 | TT | 225 | 1607 |
| rs3756008 | | 0.95 | 0.778 | 1.165 | 0.635 | 0.0316 | AA | 149 | 1042 |
| rs3756008 | | 1.25 | 0.993 | 1.58 | 0.0578 | 0.0316 | AA | 149 | 1042 |
| rs3756008 | | | | | | 0.0316 | AA | 149 | 1042 |
| rs3756008 | | 1.04 | 0.86 | 1.254 | 0.6945 | 0.0316 | AA | 149 | 1042 |
| rs3756008 | | 1.25 | 0.993 | 1.58 | 0.0578 | 0.0316 | AA | 149 | 1042 |
| rs925451 | F11 | 1.02 | 0.838 | 1.252 | 0.815 | 0.0283 | GG | 151 | 1096 |
| rs925451 | F11 | 1.33 | 1.05 | 1.681 | 0.0179 | 0.0283 | GG | 151 | 1096 |
| rs925451 | F11 | | | | | 0.0283 | GG | 151 | 1096 |
| rs925451 | F11 | 1.11 | 0.918 | 1.338 | 0.2834 | 0.0283 | GG | 151 | 1096 |
| rs925451 | F11 | 1.33 | 1.05 | 1.681 | 0.0179 | 0.0283 | GG | 151 | 1096 |
| rs3822057 | F11 | 0.84 | 0.694 | 1.011 | 0.0646 | 0.0042 | CC | 184 | 1072 |
| rs3822057 | F11 | 0.65 | 0.505 | 0.842 | 0.0011 | 0.0042 | CC | 184 | 1072 |
| rs3822057 | F11 | | | | | 0.0042 | CC | 184 | 1072 |
| rs3822057 | F11 | 0.78 | 0.656 | 0.937 | 0.0073 | 0.0042 | CC | 184 | 1072 |
| rs3822057 | F11 | 0.65 | 0.505 | 0.842 | 0.0011 | 0.0042 | CC | 184 | 1072 |
| rs2036914 | F11 | 0.9 | 0.747 | 1.079 | 0.252 | 0.0359 | CC | 201 | 1238 |
| rs2036914 | F11 | 0.71 | 0.544 | 0.921 | 0.01 | 0.0359 | CC | 201 | 1238 |
| rs2036914 | F11 | | | | | 0.0359 | CC | 201 | 1238 |
| rs2036914 | F11 | 0.85 | 0.711 | 1.008 | 0.0611 | 0.0359 | CC | 201 | 1238 |
| rs2036914 | F11 | 0.71 | 0.544 | 0.921 | 0.01 | 0.0359 | CC | 201 | 1238 |
| rs3756011 | F11 | 1.01 | 0.823 | 1.247 | 0.9046 | 0.0344 | CC | 136 | 994 |
| rs3756011 | F11 | 1.3 | 1.026 | 1.637 | 0.0295 | 0.0344 | CC | 136 | 994 |
| rs3756011 | F11 | | | | | 0.0344 | CC | 136 | 994 |
| rs3756011 | F11 | 1.1 | 0.906 | 1.336 | 0.3371 | 0.0344 | CC | 136 | 994 |
| rs3756011 | F11 | 1.3 | 1.026 | 1.637 | 0.0295 | 0.0344 | CC | 136 | 994 |
| rs2289252 | F11 | 1 | 0.807 | 1.226 | 0.9634 | 0.032 | CC | 134 | 974 |
| rs2289252 | F11 | 1.29 | 1.017 | 1.63 | 0.0354 | 0.032 | CC | 134 | 974 |
| rs2289252 | F11 | | | | | 0.032 | CC | 134 | 974 |
| rs2289252 | F11 | 1.08 | 0.891 | 1.318 | 0.4225 | 0.032 | CC | 134 | 974 |
| rs2289252 | F11 | 1.29 | 1.017 | 1.63 | 0.0354 | 0.032 | CC | 134 | 974 |
| rs2281390 | LOC642074/ | 0.89 | 0.742 | 1.079 | 0.2445 | 0.0318 | GG | 383 | 2448 |
| | LOC642043 | | | | | | | | |
| rs2281390 | LOC642074/ | 1.54 | 1.043 | 2.278 | 0.0298 | 0.0318 | GG | 383 | 2448 |
| | LOC642043 | | | | | | | | |
| rs2281390 | LOC642074/ | | | | | 0.0318 | GG | 383 | 2448 |
| | LOC642043 | | | | | | | | |
| rs2281390 | LOC642074/ | 0.95 | 0.8 | 1.139 | 0.6074 | 0.0318 | GG | 383 | 2448 |
| | LOC642043 | | | | | | | | |
| rs2281390 | LOC642074/ | 1.54 | 1.043 | 2.278 | 0.0298 | 0.0318 | GG | 383 | 2448 |
| | LOC642043 | | | | | | | | |
| rs2274736 | PTPN21 | 1.13 | 0.94 | 1.361 | 0.1919 | 0.0308 | AA | 208 | 1498 |
| rs2274736 | PTPN21 | 1.42 | 1.092 | 1.842 | 0.0088 | 0.0308 | AA | 208 | 1498 |
| rs2274736 | PTPN21 | | | | | 0.0308 | AA | 208 | 1498 |
| rs2274736 | PTPN21 | 1.19 | 0.998 | 1.415 | 0.0522 | 0.0308 | AA | 208 | 1498 |
| rs2274736 | PTPN21 | 1.42 | 1.092 | 1.842 | 0.0088 | 0.0308 | AA | 208 | 1498 |
| rs2266911 | STAG2/ODZ1 | 2.74 | 1.13 | 6.635 | 0.0257 | 0.0163 | CC | 278 | 1332 |
| rs2266911 | STAG2/ODZ1 | 1.3 | 0.996 | 1.699 | 0.0533 | 0.0163 | CC | 278 | 1332 |
| rs2266911 | STAG2/ODZ1 | | | | | 0.0163 | CC | 278 | 1332 |
| rs2266911 | STAG2/ODZ1 | 1.35 | 1.042 | 1.751 | 0.0232 | 0.0163 | CC | 278 | 1332 |
| rs2266911 | STAG2/ODZ1 | 1.29 | 0.986 | 1.679 | 0.0639 | 0.0163 | CC | 278 | 1332 |
| rs3765407 | LUZP1 | 1.2 | 0.998 | 1.441 | 0.0521 | 0.1515 | TT | 372 | 2519 |
| rs3765407 | LUZP1 | 1.07 | 0.661 | 1.725 | 0.7881 | 0.1515 | TT | 372 | 2519 |
| rs3765407 | LUZP1 | | | | | 0.1515 | TT | 372 | 2519 |
| rs3765407 | LUZP1 | 1.19 | 0.993 | 1.415 | 0.06 | 0.1515 | TT | 372 | 2519 |
| rs3765407 | LUZP1 | 1.07 | 0.661 | 1.725 | 0.7881 | 0.1515 | TT | 372 | 2519 |
| rs4524 | F5 | 0.82 | 0.681 | 0.991 | 0.0404 | 0.1197 | TT | 350 | 2195 |
| rs4524 | F5 | 0.98 | 0.666 | 1.439 | 0.9138 | 0.1197 | TT | 350 | 2195 |
| rs4524 | F5 | | | | | 0.1197 | TT | 350 | 2195 |
| rs4524 | F5 | 0.84 | 0.705 | 1.006 | 0.058 | 0.1197 | TT | 350 | 2195 |
| rs4524 | F5 | 0.98 | 0.666 | 1.439 | 0.9138 | 0.1197 | TT | 350 | 2195 |
| rs2070006 | | 1.1 | 0.903 | 1.348 | 0.3359 | 0.0761 | CC | 150 | 1084 |
| rs2070006 | | 1.31 | 1.036 | 1.669 | 0.0244 | 0.0761 | CC | 150 | 1084 |
| rs2070006 | | | | | | 0.0761 | CC | 150 | 1084 |
| rs2070006 | | 1.16 | 0.963 | 1.404 | 0.1168 | 0.0761 | CC | 150 | 1084 |
| rs2070006 | | 1.31 | 1.036 | 1.669 | 0.0244 | 0.0761 | CC | 150 | 1084 |
| rs4253418 | F11 | 0.9 | 0.633 | 1.281 | 0.5596 | 0.0992 | GG | 506 | 3321 |
| rs4253418 | F11 | 3.29 | 1.058 | 10.254 | 0.0397 | 0.0992 | GG | 506 | 3321 |
| rs4253418 | F11 | | | | | 0.0992 | GG | 506 | 3321 |
| rs4253418 | F11 | 0.96 | 0.683 | 1.344 | 0.8053 | 0.0992 | GG | 506 | 3321 |
| rs4253418 | F11 | 3.29 | 1.058 | 10.254 | 0.0397 | 0.0992 | GG | 506 | 3321 |
| rs169713 | | 0.85 | 0.709 | 1.029 | 0.0975 | 0.1511 | TT | 338 | 2143 |
| rs169713 | | 1.15 | 0.789 | 1.685 | 0.4617 | 0.1511 | TT | 338 | 2143 |
| rs169713 | | | | | | 0.1511 | TT | 338 | 2143 |
| rs169713 | | 0.89 | 0.745 | 1.06 | 0.1906 | 0.1511 | TT | 338 | 2143 |
| rs169713 | | 1.15 | 0.789 | 1.685 | 0.4617 | 0.1511 | TT | 338 | 2143 |
| rs8176750 | ABO | 0.95 | 0.727 | 1.235 | 0.6915 | 0.0912 | CC | 469 | 3083 |
| rs8176750 | ABO | 2.94 | 1.094 | 7.894 | 0.0325 | 0.0912 | CC | 469 | 3083 |
| rs8176750 | ABO | | | | | 0.0912 | CC | 469 | 3083 |
| rs8176750 | ABO | 0.99 | 0.764 | 1.279 | 0.9286 | 0.0912 | CC | 469 | 3083 |
| rs8176750 | ABO | 2.94 | 1.094 | 7.894 | 0.0325 | 0.0912 | CC | 469 | 3083 |
| rs8176750 | ABO | 0.88 | 0.672 | 1.159 | 0.3685 | 0.0704 | CC | 345 | 2125 |
| rs8176750 | ABO | 2.87 | 1.063 | 7.725 | 0.0374 | 0.0704 | CC | 345 | 2125 |
| rs8176750 | ABO | | | | | 0.0704 | CC | 345 | 2125 |
| rs8176750 | ABO | 0.92 | 0.707 | 1.201 | 0.5458 | 0.0704 | CC | 345 | 2125 |
| rs8176750 | ABO | 2.92 | 1.086 | 7.876 | 0.0337 | 0.0704 | CC | 345 | 2125 |
| rs8176719 | ABO | 1.21 | 0.984 | 1.498 | 0.0704 | 0.0549 | TT | 123 | 952 |
| rs8176719 | ABO | 1.36 | 1.052 | 1.759 | 0.019 | 0.0549 | TT | 123 | 952 |
| rs8176719 | ABO | | | | | 0.0549 | TT | 123 | 952 |
| rs8176719 | ABO | 1.25 | 1.022 | 1.529 | 0.0301 | 0.0549 | TT | 123 | 952 |
| rs8176719 | ABO | 1.36 | 1.052 | 1.759 | 0.019 | 0.0549 | TT | 123 | 952 |
| rs2069946 | PROCR | 0.79 | 0.599 | 1.047 | 0.1017 | 0.1585 | TT | 482 | 3081 |
| rs2069946 | PROCR | 0.36 | 0.05 | 2.545 | 0.3048 | 0.1585 | TT | 482 | 3081 |
| rs2069946 | PROCR | | | | | 0.1585 | TT | 482 | 3081 |
| rs2069946 | PROCR | 0.78 | 0.588 | 1.023 | 0.0718 | 0.1585 | TT | 482 | 3081 |
| rs2069946 | PROCR | 0.36 | 0.05 | 2.545 | 0.3048 | 0.1585 | TT | 482 | 3081 |
| rs2266911 | STAG2/ODZ1 | 0.75 | 0.542 | 1.033 | 0.0784 | 0.0881 | CC | 136 | 1292 |
| rs2266911 | STAG2/ODZ1 | 0.47 | 0.175 | 1.278 | 0.1399 | 0.0881 | CC | 136 | 1292 |
| rs2266911 | STAG2/ODZ1 | | | | | 0.0881 | CC | 136 | 1292 |
| rs2266911 | STAG2/ODZ1 | 0.72 | 0.524 | 0.982 | 0.0384 | 0.0881 | CC | 136 | 1292 |
| rs2266911 | STAG2/ODZ1 | 0.52 | 0.192 | 1.389 | 0.1901 | 0.0881 | CC | 136 | 1292 |
| rs6003 | F13B | 1.01 | 0.81 | 1.267 | 0.9087 | 0.256 | AA | 421 | 2802 |
| rs6003 | F13B | 1.62 | 0.913 | 2.88 | 0.0988 | 0.256 | AA | 421 | 2802 |
| rs6003 | F13B | | | | | 0.256 | AA | 421 | 2802 |
| rs6003 | F13B | 1.06 | 0.855 | 1.31 | 0.6027 | 0.256 | AA | 421 | 2802 |
| rs6003 | F13B | 1.62 | 0.913 | 2.88 | 0.0988 | 0.256 | AA | 421 | 2802 |
| rs1417121 | SDCCAG8/ | 1.02 | 0.854 | 1.224 | 0.8117 | 0.2183 | GG | 259 | 1733 |
| | AKT3 | | | | | | | | |
| rs1417121 | SDCCAG8/ | 1.27 | 0.967 | 1.672 | 0.0854 | 0.2183 | GG | 259 | 1733 |
| | AKT3 | | | | | | | | |
| rs1417121 | SDCCAG8/ | | | | | 0.2183 | GG | 259 | 1733 |
| | AKT3 | | | | | | | | |
| rs1417121 | SDCCAG8/ | 1.07 | 0.904 | 1.266 | 0.4343 | 0.2183 | GG | 259 | 1733 |
| | AKT3 | | | | | | | | |
| rs1417121 | SDCCAG8/ | 1.27 | 0.967 | 1.672 | 0.0854 | 0.2183 | GG | 259 | 1733 |
| | AKT3 | | | | | | | | |
| rs12744297 | AKT3 | 1.12 | 0.934 | 1.34 | 0.2246 | 0.2172 | AA | 217 | 1479 |
| rs12744297 | AKT3 | 0.89 | 0.67 | 1.191 | 0.4428 | 0.2172 | AA | 217 | 1479 |
| rs12744297 | AKT3 | | | | | 0.2172 | AA | 217 | 1479 |
| rs12744297 | AKT3 | 1.07 | 0.899 | 1.27 | 0.4531 | 0.2172 | AA | 217 | 1479 |
| rs12744297 | AKT3 | 0.89 | 0.67 | 1.191 | 0.4428 | 0.2172 | AA | 217 | 1479 |
| rs3733402 | KLKB1 | 0.88 | 0.725 | 1.058 | 0.1696 | 0.2211 | AA | 189 | 1133 |
| rs3733402 | KLKB1 | 0.82 | 0.644 | 1.051 | 0.1189 | 0.2211 | AA | 189 | 1133 |
| rs3733402 | KLKB1 | | | | | 0.2211 | AA | 189 | 1133 |
| rs3733402 | KLKB1 | 0.86 | 0.721 | 1.027 | 0.0967 | 0.2211 | AA | 189 | 1133 |
| rs3733402 | KLKB1 | 0.82 | 0.644 | 1.051 | 0.1189 | 0.2211 | AA | 189 | 1133 |
| rs3087505 | KLKB1 | 0.89 | 0.705 | 1.123 | 0.3252 | 0.2805 | GG | 450 | 2940 |
| rs3087505 | KLKB1 | 1.58 | 0.75 | 3.339 | 0.2284 | 0.2805 | GG | 450 | 2940 |
| rs3087505 | KLKB1 | | | | | 0.2805 | GG | 450 | 2940 |
| rs3087505 | KLKB1 | 0.92 | 0.735 | 1.153 | 0.4718 | 0.2805 | GG | 450 | 2940 |
| rs3087505 | KLKB1 | 1.58 | 0.75 | 3.339 | 0.2284 | 0.2805 | GG | 450 | 2940 |
| rs2480089 | KIF6 | 1.12 | 0.932 | 1.344 | 0.2266 | 0.2685 | AA | 225 | 1576 |
| rs2480089 | KIF6 | 1.22 | 0.931 | 1.588 | 0.151 | 0.2685 | AA | 225 | 1576 |
| rs2480089 | KIF6 | | | | | 0.2685 | AA | 225 | 1576 |
| rs2480089 | KIF6 | 1.14 | 0.96 | 1.354 | 0.135 | 0.2685 | AA | 225 | 1576 |
| rs2480089 | KIF6 | 1.22 | 0.931 | 1.588 | 0.151 | 0.2685 | AA | 225 | 1576 |
| rs8176750 | ABO | 0.88 | 0.672 | 1.159 | 0.3685 | 0.0704 | CC | 345 | 2125 |
| rs8176750 | ABO | 2.87 | 1.063 | 7.725 | 0.0374 | 0.0704 | CC | 345 | 2125 |
| rs8176750 | ABO | | | | | 0.0704 | CC | 345 | 2125 |
| rs8176750 | ABO | 0.92 | 0.707 | 1.201 | 0.5458 | 0.0704 | CC | 345 | 2125 |
| rs8176750 | ABO | 2.92 | 1.086 | 7.876 | 0.0337 | 0.0704 | CC | 345 | 2125 |
| rs8176719 | ABO | 1.21 | 0.984 | 1.498 | 0.0704 | 0.0549 | TT | 123 | 952 |
| rs8176719 | ABO | 1.36 | 1.052 | 1.759 | 0.019 | 0.0549 | TT | 123 | 952 |
| rs8176719 | ABO | | | | | 0.0549 | TT | 123 | 952 |
| rs8176719 | ABO | 1.25 | 1.022 | 1.529 | 0.0301 | 0.0549 | TT | 123 | 952 |
| rs8176719 | ABO | 1.36 | 1.052 | 1.759 | 0.019 | 0.0549 | TT | 123 | 952 |
| rs3730055 | AKT2 | 1.22 | 0.967 | 1.537 | 0.0934 | 0.2272 | CC | 436 | 2935 |
| rs3730055 | AKT2 | 0.88 | 0.394 | 1.974 | 0.7595 | 0.2272 | CC | 436 | 2935 |
| rs3730055 | AKT2 | | | | | 0.2272 | CC | 436 | 2935 |
| rs3730055 | AKT2 | 1.19 | 0.95 | 1.489 | 0.1309 | 0.2272 | CC | 436 | 2935 |
| rs3730055 | AKT2 | 0.88 | 0.394 | 1.974 | 0.7595 | 0.2272 | CC | 436 | 2935 |
| rs2304167 | GP6 | 1.18 | 0.98 | 1.41 | 0.081 | 0.2165 | TT | 345 | 2364 |
| rs2304167 | GP6 | 1.09 | 0.688 | 1.714 | 0.7231 | 0.2165 | TT | 345 | 2364 |
| rs2304167 | GP6 | | | | | 0.2165 | TT | 345 | 2364 |
| rs2304167 | GP6 | 1.17 | 0.978 | 1.39 | 0.0864 | 0.2165 | TT | 345 | 2364 |
| rs2304167 | GP6 | 1.09 | 0.688 | 1.714 | 0.7231 | 0.2165 | TT | 345 | 2364 |
| rs1654416 | RDH13/GP6 | 1.17 | 0.975 | 1.405 | 0.0912 | 0.2362 | TT | 348 | 2379 |
| rs1654416 | RDH13/GP6 | 1.01 | 0.623 | 1.627 | 0.9773 | 0.2362 | TT | 348 | 2379 |
| rs1654416 | RDH13/GP6 | | | | | 0.2362 | TT | 348 | 2379 |
| rs1654416 | RDH13/GP6 | 1.15 | 0.966 | 1.377 | 0.1144 | 0.2362 | TT | 348 | 2379 |
| rs1654416 | RDH13/GP6 | 1.01 | 0.623 | 1.627 | 0.9773 | 0.2362 | TT | 348 | 2379 |

TABLE 9

| | | | | | | | OR | OR | | | | | |
|---|---|---|---|---|---|---|---|---|---|---|---|---|---|
| | | | | | | | 95% | 95% | | | | | HW |
| | | | | GENO | | | CI | CI | | | Risk | Ref | (CONTROL) |
| SNP hCV # | SNP rs # | Gene | MODE | TYPE | ADJUST | OR | lower | upper | ProbChiSq | P_DF2 | allele | allele | pExact |
| hCV16282389 | rs2726953 | SCARA5 | GEN | AG | sex age | 1.049 | 0.913 | 1.205 | 0.5017 | 0.0467 | A | G | 0.6 |
| hCV16282389 | rs2726953 | SCARA5 | GEN | AA | sex age | 1.34 | 1.063 | 1.689 | 0.0133 | 0.0467 | A | G | 0.6 |
| hCV16282389 | rs2726953 | SCARA5 | ADD | A | sex age | 1.115 | 1.01 | 1.232 | 0.0318 | — | A | G | 0.6 |
| hCV16282389 | rs2726953 | SCARA5 | DOM | AG or AA | sex age | 1.1 | 0.964 | 1.254 | 0.1567 | — | A | G | 0.6 |
| hCV16282389 | rs2726953 | SCARA5 | REC | AA | sex age | 1.312 | 1.049 | 1.639 | 0.0172 | — | A | G | 0.6 |
| hCV16282389 | rs2726953 | SCARA5 | GEN | AG | | 1.046 | 0.91 | 1.201 | 0.5266 | 0.0485 | A | G | 0.6 |
| hCV16282389 | rs2726953 | SCARA5 | GEN | AA | | 1.337 | 1.061 | 1.685 | 0.0139 | 0.0485 | A | G | 0.6 |
| hCV16282389 | rs2726953 | SCARA5 | ADD | A | | 1.113 | 1.008 | 1.23 | 0.0347 | — | A | G | 0.6 |
| hCV16282389 | rs2726953 | SCARA5 | DOM | AG or AA | | 1.097 | 0.962 | 1.25 | 0.1682 | — | A | G | 0.6 |
| hCV16282389 | rs2726953 | SCARA5 | REC | AA | | 1.31 | 1.049 | 1.637 | 0.0174 | — | A | G | 0.6 |
| hCV9326428 | rs687289 | ABO | GEN | AG | sex age | 2.188 | 1.891 | 2.532 | <.0001 | 0 | A | G | 0.377 |
| hCV9326428 | rs687289 | ABO | GEN | AA | sex age | 2.867 | 2.318 | 3.546 | <.0001 | 0 | A | G | 0.377 |
| hCV9326428 | rs687289 | ABO | ADD | A | sex age | 1.813 | 1.639 | 2.006 | <.0001 | — | A | G | 0.377 |
| hCV9326428 | rs687289 | ABO | DOM | AG or AA | sex age | 2.322 | 2.021 | 2.668 | <.0001 | — | A | G | 0.377 |
| hCV9326428 | rs687289 | ABO | REC | AA | sex age | 1.834 | 1.509 | 2.228 | <.0001 | — | A | G | 0.377 |
| hCV9326428 | rs687289 | ABO | GEN | AG | | 2.18 | 1.885 | 2.521 | <.0001 | 0 | A | G | 0.377 |
| hCV9326428 | rs687289 | ABO | GEN | AA | | 2.851 | 2.307 | 3.524 | <.0001 | 0 | A | G | 0.377 |
| hCV9326428 | rs687289 | ABO | ADD | A | | 1.807 | 1.634 | 1.999 | <.0001 | — | A | G | 0.377 |
| hCV9326428 | rs687289 | ABO | DOM | AG or AA | | 2.313 | 2.014 | 2.657 | <.0001 | — | A | G | 0.377 |
| hCV9326428 | rs687289 | ABO | REC | AA | | 1.829 | 1.506 | 2.221 | <.0001 | — | A | G | 0.377 |
| hCV15887091 | rs2519093 | ABO | GEN | TC | sex age | 2.135 | 1.852 | 2.462 | <.0001 | 0 | T | C | 0.0024 |
| hCV15887091 | rs2519093 | ABO | GEN | TT | sex age | 1.962 | 1.457 | 2.642 | <.0001 | 0 | T | C | 0.0024 |
| hCV15887091 | rs2519093 | ABO | ADD | T | sex age | 1.766 | 1.576 | 1.979 | <.0001 | — | T | C | 0.0024 |
| hCV15887091 | rs2519093 | ABO | DOM | TC or TT | sex age | 2.111 | 1.843 | 2.419 | <.0001 | — | T | C | 0.0024 |
| hCV15887091 | rs2519093 | ABO | REC | TT | sex age | 1.475 | 1.101 | 1.975 | 0.0092 | — | T | C | 0.0024 |
| hCV15887091 | rs2519093 | ABO | GEN | TC | | 2.123 | 1.842 | 2.447 | <.0001 | 0 | T | C | 0.0024 |
| hCV15887091 | rs2519093 | ABO | GEN | TT | | 1.964 | 1.46 | 2.641 | <.0001 | 0 | T | C | 0.0024 |
| hCV15887091 | rs2519093 | ABO | ADD | T | | 1.76 | 1.571 | 1.972 | <.0001 | — | T | C | 0.0024 |
| hCV15887091 | rs2519093 | ABO | DOM | TC or TT | | 2.101 | 1.834 | 2.406 | <.0001 | — | T | C | 0.0024 |
| hCV15887091 | rs2519093 | ABO | REC | TT | | 1.48 | 1.106 | 1.981 | 0.0084 | — | T | C | 0.0024 |
| hCV3188439 | rs4981022 | STAB2 | GEN | GA | sex age | 0.852 | 0.741 | 0.979 | 0.0242 | 0.0298 | G | A | 0.161 |
| hCV3188439 | rs4981022 | STAB2 | GEN | GG | sex age | 0.799 | 0.642 | 0.995 | 0.0453 | 0.0298 | G | A | 0.161 |
| hCV3188439 | rs4981022 | STAB2 | ADD | G | sex age | 0.88 | 0.798 | 0.97 | 0.0101 | — | G | A | 0.161 |
| hCV3188439 | rs4981022 | STAB2 | DOM | GA or GG | sex age | 0.841 | 0.737 | 0.959 | 0.0096 | — | G | A | 0.161 |
| hCV3188439 | rs4981022 | STAB2 | REC | GG | sex age | 0.861 | 0.699 | 1.062 | 0.1623 | — | G | A | 0.161 |
| hCV3188439 | rs4981022 | STAB2 | GEN | GA | | 0.851 | 0.741 | 0.978 | 0.0232 | 0.0285 | G | A | 0.161 |
| hCV3188439 | rs4981022 | STAB2 | GEN | GG | | 0.799 | 0.642 | 0.994 | 0.0444 | 0.0285 | G | A | 0.161 |
| hCV3188439 | rs4981022 | STAB2 | ADD | G | | 0.879 | 0.798 | 0.969 | 0.0096 | — | G | A | 0.161 |
| hCV3188439 | rs4981022 | STAB2 | DOM | GA or GG | | 0.84 | 0.737 | 0.958 | 0.0091 | — | G | A | 0.161 |
| hCV3188439 | rs4981022 | STAB2 | REC | GG | | 0.861 | 0.699 | 1.061 | 0.1606 | — | G | A | 0.161 |
| hCV3188431 | rs12229292 | STAB2 | GEN | TG | sex age | 0.994 | 0.867 | 1.14 | 0.9337 | 0.0033 | T | G | 0.0155 |
| hCV3188431 | rs12229292 | STAB2 | GEN | TT | sex age | 1.563 | 1.196 | 2.042 | 0.0011 | 0.0033 | T | G | 0.0155 |
| hCV3188431 | rs12229292 | STAB2 | ADD | T | sex age | 1.121 | 1.009 | 1.245 | 0.0332 | — | T | G | 0.0155 |
| hCV3188431 | rs12229292 | STAB2 | DOM | TG or TT | sex age | 1.063 | 0.933 | 1.212 | 0.3598 | — | T | G | 0.0155 |
| hCV3188431 | rs12229292 | STAB2 | REC | TT | sex age | 1.567 | 1.207 | 2.034 | 0.0007 | — | T | G | 0.0155 |
| hCV3188431 | rs12229292 | STAB2 | GEN | TG | | 1.004 | 0.875 | 1.151 | 0.9597 | 0.0035 | T | G | 0.0155 |
| hCV3188431 | rs12229292 | STAB2 | GEN | TT | | 1.564 | 1.198 | 2.043 | 0.001 | 0.0035 | T | G | 0.0155 |
| hCV3188431 | rs12229292 | STAB2 | ADD | T | | 1.126 | 1.014 | 1.25 | 0.0264 | — | T | G | 0.0155 |
| hCV3188431 | rs12229292 | STAB2 | DOM | TG or TT | | 1.072 | 0.94 | 1.222 | 0.2992 | — | T | G | 0.0155 |
| hCV3188431 | rs12229292 | STAB2 | REC | TT | | 1.562 | 1.204 | 2.026 | 0.0008 | — | T | G | 0.0155 |
| hCV2485050 | rs6575009 | | GEN | GA | sex age | 1.226 | 1.003 | 1.499 | 0.0465 | 0.1052 | G | A | 0.29 |
| hCV2485050 | rs6575009 | | GEN | GG | sex age | 1.412 | 0.601 | 3.319 | 0.4282 | 0.1052 | G | A | 0.29 |
| hCV2485050 | rs6575009 | | ADD | G | sex age | 1.22 | 1.015 | 1.466 | 0.0342 | — | G | A | 0.29 |
| hCV2485050 | rs6575009 | | DOM | GA or GG | sex age | 1.234 | 1.014 | 1.503 | 0.0358 | — | G | A | 0.29 |
| hCV2485050 | rs6575009 | | REC | GG | sex age | 1.378 | 0.587 | 3.236 | 0.4621 | — | G | A | 0.29 |
| hCV2485050 | rs6575009 | | GEN | GA | | 1.23 | 1.006 | 1.503 | 0.0432 | 0.0993 | G | A | 0.29 |
| hCV2485050 | rs6575009 | | GEN | GG | | 1.408 | 0.6 | 3.304 | 0.4315 | 0.0993 | G | A | 0.29 |
| hCV2485050 | rs6575009 | | ADD | G | | 1.222 | 1.017 | 1.468 | 0.0321 | — | G | A | 0.29 |
| hCV2485050 | rs6575009 | | DOM | GA or GG | | 1.238 | 1.017 | 1.506 | 0.0333 | — | G | A | 0.29 |
| hCV2485050 | rs6575009 | | REC | GG | | 1.373 | 0.585 | 3.22 | 0.4662 | — | G | A | 0.29 |
| hCV27960688 | rs4900088 | TC2N | GEN | AG | sex age | 1.131 | 0.973 | 1.314 | 0.1087 | 0.0034 | A | G | 0.59 |
| hCV27960688 | rs4900088 | TC2N | GEN | AA | sex age | 1.387 | 1.147 | 1.677 | 0.0008 | 0.0034 | A | G | 0.59 |
| hCV27960688 | rs4900088 | TC2N | ADD | A | sex age | 1.172 | 1.067 | 1.287 | 0.0009 | — | A | G | 0.59 |
| hCV27960688 | rs4900088 | TC2N | DOM | AG or AA | sex age | 1.198 | 1.039 | 1.38 | 0.0127 | — | A | G | 0.59 |
| hCV27960688 | rs4900088 | TC2N | REC | AA | sex age | 1.286 | 1.089 | 1.518 | 0.003 | — | A | G | 0.59 |
| hCV27960688 | rs4900088 | TC2N | GEN | AG | | 1.136 | 0.978 | 1.32 | 0.0951 | 0.0026 | A | G | 0.59 |
| hCV27960688 | rs4900088 | TC2N | GEN | AA | | 1.396 | 1.155 | 1.688 | 0.0006 | 0.0026 | A | G | 0.59 |
| hCV27960688 | rs4900088 | TC2N | ADD | A | | 1.176 | 1.071 | 1.291 | 0.0007 | — | A | G | 0.59 |
| hCV27960688 | rs4900088 | TC2N | DOM | AG or AA | | 1.204 | 1.045 | 1.387 | 0.0101 | — | A | G | 0.59 |
| hCV27960688 | rs4900088 | TC2N | REC | AA | | 1.291 | 1.094 | 1.524 | 0.0025 | — | A | G | 0.59 |
| hCV2889230 | rs11686314 | | GEN | AG | sex age | 0.943 | 0.807 | 1.103 | 0.4629 | 0.029 | A | G | 0.116 |
| hCV2889230 | rs11686314 | | GEN | AA | sex age | 0.511 | 0.308 | 0.847 | 0.0092 | 0.029 | A | G | 0.116 |
| hCV2889230 | rs11686314 | | ADD | A | sex age | 0.875 | 0.764 | 1.003 | 0.0545 | — | A | G | 0.116 |
| hCV2889230 | rs11686314 | | DOM | AG or AA | sex age | 0.902 | 0.775 | 1.049 | 0.1817 | — | A | G | 0.116 |
| hCV2889230 | rs11686314 | | REC | AA | sex age | 0.518 | 0.313 | 0.857 | 0.0105 | — | A | G | 0.116 |
| hCV2889230 | rs11686314 | | GEN | AG | | 0.941 | 0.805 | 1.1 | 0.4459 | 0.0316 | A | G | 0.116 |
| hCV2889230 | rs11686314 | | GEN | AA | | 0.517 | 0.312 | 0.856 | 0.0104 | 0.0316 | A | G | 0.116 |
| hCV2889230 | rs11686314 | | ADD | A | | 0.875 | 0.764 | 1.002 | 0.0542 | — | A | G | 0.116 |
| hCV2889230 | rs11686314 | | DOM | AG or AA | | 0.901 | 0.774 | 1.048 | 0.1761 | — | A | G | 0.116 |
| hCV2889230 | rs11686314 | | REC | AA | | 0.524 | 0.317 | 0.867 | 0.0119 | — | A | G | 0.116 |
| hCV31716902 | rs12999640 | | GEN | TC | sex age | 0.938 | 0.806 | 1.091 | 0.408 | 0.086 | T | C | 0.207 |
| hCV31716902 | rs12999640 | | GEN | TT | sex age | 0.619 | 0.398 | 0.964 | 0.034 | 0.086 | T | C | 0.207 |
| hCV31716902 | rs12999640 | | ADD | T | sex age | 0.889 | 0.781 | 1.012 | 0.0746 | — | T | C | 0.207 |
| hCV31716902 | rs12999640 | | DOM | TC or TT | sex age | 0.906 | 0.782 | 1.049 | 0.1866 | — | T | C | 0.207 |
| hCV31716902 | rs12999640 | | REC | TT | sex age | 0.63 | 0.405 | 0.979 | 0.0399 | — | T | C | 0.207 |
| hCV31716902 | rs12999640 | | GEN | TC | | 0.934 | 0.803 | 1.087 | 0.3778 | 0.092 | T | C | 0.207 |
| hCV31716902 | rs12999640 | | GEN | TT | | 0.627 | 0.403 | 0.976 | 0.0386 | 0.092 | T | C | 0.207 |
| hCV31716902 | rs12999640 | | ADD | T | | 0.888 | 0.78 | 1.011 | 0.072 | — | T | C | 0.207 |
| hCV31716902 | rs12999640 | | DOM | TC or TT | | 0.903 | 0.78 | 1.046 | 0.1741 | — | T | C | 0.207 |
| hCV31716902 | rs12999640 | | REC | TT | | 0.638 | 0.411 | 0.991 | 0.0456 | — | T | C | 0.207 |
| hCV27484761 | rs3783886 | PTPN21 | GEN | GA | sex age | 1.317 | 1.074 | 1.615 | 0.0081 | 0.0178 | G | A | 0.0779 |
| hCV27484761 | rs3783886 | PTPN21 | GEN | GG | sex age | 1.566 | 0.708 | 3.467 | 0.2683 | 0.0178 | G | A | 0.0779 |
| hCV27484761 | rs3783886 | PTPN21 | ADD | G | sex age | 1.304 | 1.085 | 1.567 | 0.0047 | — | G | A | 0.0779 |
| hCV27484761 | rs3783886 | PTPN21 | DOM | GA or GG | sex age | 1.33 | 1.09 | 1.623 | 0.005 | — | G | A | 0.0779 |
| hCV27484761 | rs3783886 | PTPN21 | REC | GG | sex age | 1.515 | 0.685 | 3.353 | 0.3049 | — | G | A | 0.0779 |
| hCV27484761 | rs3783886 | PTPN21 | GEN | GA | | 1.323 | 1.079 | 1.622 | 0.0071 | 0.0155 | G | A | 0.0779 |
| hCV27484761 | rs3783886 | PTPN21 | GEN | GG | | 1.575 | 0.712 | 3.481 | 0.2619 | 0.0155 | G | A | 0.0779 |
| hCV27484761 | rs3783886 | PTPN21 | ADD | G | | 1.309 | 1.089 | 1.573 | 0.004 | — | G | A | 0.0779 |
| hCV27484761 | rs3783886 | PTPN21 | DOM | GA or GG | | 1.336 | 1.095 | 1.63 | 0.0043 | — | G | A | 0.0779 |
| hCV27484761 | rs3783886 | PTPN21 | REC | GG | | 1.523 | 0.689 | 3.365 | 0.2984 | — | G | A | 0.0779 |

| | | | | GENO | | | CASE | CONTROL | | CASE | CONTROL |
|---|---|---|---|---|---|---|---|---|---|---|---|
| SNP hCV # | SNP rs # | Gene | MODE | TYPE | ADJUST | Geno t | cnt | cnt | Geno t | cnt | cnt |
| hCV16282389 | rs2726953 | SCARA5 | GEN | AG | sex age | AA | 201 | 149 | AG | 745 | 706 |
| hCV16282389 | rs2726953 | SCARA5 | GEN | AA | sex age | AA | 201 | 149 | AG | 745 | 706 |
| hCV16282389 | rs2726953 | SCARA5 | ADD | A | sex age | AA | 201 | 149 | AG | 745 | 706 |
| hCV16282389 | rs2726953 | SCARA5 | DOM | AG or AA | sex age | AA | 201 | 149 | AG | 745 | 706 |
| hCV16282389 | rs2726953 | SCARA5 | REC | AA | sex age | AA | 201 | 149 | AG | 745 | 706 |
| hCV16282389 | rs2726953 | SCARA5 | GEN | AG | | AA | 201 | 149 | AG | 745 | 706 |
| hCV16282389 | rs2726953 | SCARA5 | GEN | AA | | AA | 201 | 149 | AG | 745 | 706 |
| hCV16282389 | rs2726953 | SCARA5 | ADD | A | | AA | 201 | 149 | AG | 745 | 706 |
| hCV16282389 | rs2726953 | SCARA5 | DOM | AG or AA | | AA | 201 | 149 | AG | 745 | 706 |
| hCV16282389 | rs2726953 | SCARA5 | REC | AA | | AA | 201 | 149 | AG | 745 | 706 |
| hCV9326428 | rs687289 | ABO | GEN | AG | sex age | AA | 326 | 184 | AG | 1005 | 742 |
| hCV9326428 | rs687289 | ABO | GEN | AA | sex age | AA | 326 | 184 | AG | 1005 | 742 |
| hCV9326428 | rs687289 | ABO | ADD | A | sex age | AA | 326 | 184 | AG | 1005 | 742 |
| hCV9326428 | rs687289 | ABO | DOM | AG or AA | sex age | AA | 326 | 184 | AG | 1005 | 742 |
| hCV9326428 | rs687289 | ABO | REC | AA | sex age | AA | 326 | 184 | AG | 1005 | 742 |
| hCV9326428 | rs687289 | ABO | GEN | AG | | AA | 326 | 184 | AG | 1005 | 742 |
| hCV9326428 | rs687289 | ABO | GEN | AA | | AA | 326 | 184 | AG | 1005 | 742 |
| hCV9326428 | rs687289 | ABO | ADD | A | | AA | 326 | 184 | AG | 1005 | 742 |
| hCV9326428 | rs687289 | ABO | DOM | AG or AA | | AA | 326 | 184 | AG | 1005 | 742 |
| hCV9326428 | rs687289 | ABO | REC | AA | | AA | 326 | 184 | AG | 1005 | 742 |
| hCV15887091 | rs2519093 | ABO | GEN | TC | sex age | TT | 121 | 79 | TC | 803 | 485 |
| hCV15887091 | rs2519093 | ABO | GEN | TT | sex age | TT | 121 | 79 | TC | 803 | 485 |
| hCV15887091 | rs2519093 | ABO | ADD | T | sex age | TT | 121 | 79 | TC | 803 | 485 |
| hCV15887091 | rs2519093 | ABO | DOM | TC or TT | sex age | TT | 121 | 79 | TC | 803 | 485 |
| hCV15887091 | rs2519093 | ABO | REC | TT | sex age | TT | 121 | 79 | TC | 803 | 485 |
| hCV15887091 | rs2519093 | ABO | GEN | TC | | TT | 121 | 79 | TC | 803 | 485 |
| hCV15887091 | rs2519093 | ABO | GEN | TT | | TT | 121 | 79 | TC | 803 | 485 |
| hCV15887091 | rs2519093 | ABO | ADD | T | | TT | 121 | 79 | TC | 803 | 485 |
| hCV15887091 | rs2519093 | ABO | DOM | TC or TT | | TT | 121 | 79 | TC | 803 | 485 |
| hCV15887091 | rs2519093 | ABO | REC | TT | | TT | 121 | 79 | TC | 803 | 485 |
| hCV3188439 | rs4981022 | STAB2 | GEN | GA | sex age | GG | 190 | 206 | GA | 738 | 751 |
| hCV3188439 | rs4981022 | STAB2 | GEN | GG | sex age | GG | 190 | 206 | GA | 738 | 751 |
| hCV3188439 | rs4981022 | STAB2 | ADD | G | sex age | GG | 190 | 206 | GA | 738 | 751 |
| hCV3188439 | rs4981022 | STAB2 | DOM | GA or GG | sex age | GG | 190 | 206 | GA | 738 | 751 |
| hCV3188439 | rs4981022 | STAB2 | REC | GG | sex age | GG | 190 | 206 | GA | 738 | 751 |
| hCV3188439 | rs4981022 | STAB2 | GEN | GA | | GG | 190 | 206 | GA | 738 | 751 |
| hCV3188439 | rs4981022 | STAB2 | GEN | GG | | GG | 190 | 206 | GA | 738 | 751 |
| hCV3188439 | rs4981022 | STAB2 | ADD | G | | GG | 190 | 206 | GA | 738 | 751 |
| hCV3188439 | rs4981022 | STAB2 | DOM | GA or GG | | GG | 190 | 206 | GA | 738 | 751 |
| hCV3188439 | rs4981022 | STAB2 | REC | GG | | GG | 190 | 206 | GA | 738 | 751 |
| hCV3188431 | rs12229292 | STAB2 | GEN | TG | sex age | TT | 158 | 99 | TG | 732 | 715 |
| hCV3188431 | rs12229292 | STAB2 | GEN | TT | sex age | TT | 158 | 99 | TG | 732 | 715 |
| hCV3188431 | rs12229292 | STAB2 | ADD | T | sex age | TT | 158 | 99 | TG | 732 | 715 |
| hCV3188431 | rs12229292 | STAB2 | DOM | TG or TT | sex age | TT | 158 | 99 | TG | 732 | 715 |
| hCV3188431 | rs12229292 | STAB2 | REC | TT | sex age | TT | 158 | 99 | TG | 732 | 715 |
| hCV3188431 | rs12229292 | STAB2 | GEN | TG | | TT | 158 | 99 | TG | 732 | 715 |
| hCV3188431 | rs12229292 | STAB2 | GEN | TT | | TT | 158 | 99 | TG | 732 | 715 |
| hCV3188431 | rs12229292 | STAB2 | ADD | T | | TT | 158 | 99 | TG | 732 | 715 |
| hCV3188431 | rs12229292 | STAB2 | DOM | TG or TT | | TT | 158 | 99 | TG | 732 | 715 |
| hCV3188431 | rs12229292 | STAB2 | REC | TT | | TT | 158 | 99 | TG | 732 | 715 |
| hCV2485050 | rs6575009 | | GEN | GA | sex age | GG | 13 | 9 | GA | 246 | 195 |
| hCV2485050 | rs6575009 | | GEN | GG | sex age | GG | 13 | 9 | GA | 246 | 195 |
| hCV2485050 | rs6575009 | | ADD | G | sex age | GG | 13 | 9 | GA | 246 | 195 |
| hCV2485050 | rs6575009 | | DOM | GA or GG | sex age | GG | 13 | 9 | GA | 246 | 195 |
| hCV2485050 | rs6575009 | | REC | GG | sex age | GG | 13 | 9 | GA | 246 | 195 |
| hCV2485050 | rs6575009 | | GEN | GA | | GG | 13 | 9 | GA | 246 | 195 |
| hCV2485050 | rs6575009 | | GEN | GG | | GG | 13 | 9 | GA | 246 | 195 |
| hCV2485050 | rs6575009 | | ADD | G | | GG | 13 | 9 | GA | 246 | 195 |
| hCV2485050 | rs6575009 | | DOM | GA or GG | | GG | 13 | 9 | GA | 246 | 195 |
| hCV2485050 | rs6575009 | | REC | GG | | GG | 13 | 9 | GA | 246 | 195 |
| hCV27960688 | rs4900088 | TC2N | GEN | AG | sex age | AA | 397 | 306 | AG | 913 | 865 |
| hCV27960688 | rs4900088 | TC2N | GEN | AA | sex age | AA | 397 | 306 | AG | 913 | 865 |
| hCV27960688 | rs4900088 | TC2N | ADD | A | sex age | AA | 397 | 306 | AG | 913 | 865 |
| hCV27960688 | rs4900088 | TC2N | DOM | AG or AA | sex age | AA | 397 | 306 | AG | 913 | 865 |
| hCV27960688 | rs4900088 | TC2N | REC | AA | sex age | AA | 397 | 306 | AG | 913 | 865 |
| hCV27960688 | rs4900088 | TC2N | GEN | AG | | AA | 397 | 306 | AG | 913 | 865 |
| hCV27960688 | rs4900088 | TC2N | GEN | AA | | AA | 397 | 306 | AG | 913 | 865 |
| hCV27960688 | rs4900088 | TC2N | ADD | A | | AA | 397 | 306 | AG | 913 | 865 |
| hCV27960688 | rs4900088 | TC2N | DOM | AG or AA | | AA | 397 | 306 | AG | 913 | 865 |
| hCV27960688 | rs4900088 | TC2N | REC | AA | | AA | 397 | 306 | AG | 913 | 865 |
| hCV2889230 | rs11686314 | | GEN | AG | sex age | AA | 24 | 43 | AG | 417 | 410 |
| hCV2889230 | rs11686314 | | GEN | AA | sex age | AA | 24 | 43 | AG | 417 | 410 |
| hCV2889230 | rs11686314 | | ADD | A | sex age | AA | 24 | 43 | AG | 417 | 410 |
| hCV2889230 | rs11686314 | | DOM | AG or AA | sex age | AA | 24 | 43 | AG | 417 | 410 |
| hCV2889230 | rs11686314 | | REC | AA | sex age | AA | 24 | 43 | AG | 417 | 410 |
| hCV2889230 | rs11686314 | | GEN | AG | | AA | 24 | 43 | AG | 417 | 410 |
| hCV2889230 | rs11686314 | | GEN | AA | | AA | 24 | 43 | AG | 417 | 410 |
| hCV2889230 | rs11686314 | | ADD | A | | AA | 24 | 43 | AG | 417 | 410 |
| hCV2889230 | rs11686314 | | DOM | AG or AA | | AA | 24 | 43 | AG | 417 | 410 |
| hCV2889230 | rs11686314 | | REC | AA | | AA | 24 | 43 | AG | 417 | 410 |
| hCV31716902 | rs12999640 | | GEN | TC | sex age | TT | 34 | 50 | TC | 456 | 450 |
| hCV31716902 | rs12999640 | | GEN | TT | sex age | TT | 34 | 50 | TC | 456 | 450 |
| hCV31716902 | rs12999640 | | ADD | T | sex age | TT | 34 | 50 | TC | 456 | 450 |
| hCV31716902 | rs12999640 | | DOM | TC or TT | sex age | TT | 34 | 50 | TC | 456 | 450 |
| hCV31716902 | rs12999640 | | REC | TT | sex age | TT | 34 | 50 | TC | 456 | 450 |
| hCV31716902 | rs12999640 | | GEN | TC | | TT | 34 | 50 | TC | 456 | 450 |
| hCV31716902 | rs12999640 | | GEN | TT | | TT | 34 | 50 | TC | 456 | 450 |
| hCV31716902 | rs12999640 | | ADD | T | | TT | 34 | 50 | TC | 456 | 450 |
| hCV31716902 | rs12999640 | | DOM | TC or TT | | TT | 34 | 50 | TC | 456 | 450 |
| hCV31716902 | rs12999640 | | REC | TT | | TT | 34 | 50 | TC | 456 | 450 |
| hCV27484761 | rs3783886 | PTPN21 | GEN | GA | sex age | 0.17 | | | | | |
| hCV27484761 | rs3783886 | PTPN21 | GEN | GG | sex age | 0.17 | | | | | |
| hCV27484761 | rs3783886 | PTPN21 | ADD | G | sex age | 0.17 | | | | | |
| hCV27484761 | rs3783886 | PTPN21 | DOM | GA or GG | sex age | 0.17 | | | | | |
| hCV27484761 | rs3783886 | PTPN21 | REC | GG | sex age | 0.17 | | | | | |
| hCV27484761 | rs3783886 | PTPN21 | GEN | GA | | 0.17 | | | | | |
| hCV27484761 | rs3783886 | PTPN21 | GEN | GG | | 0.17 | | | | | |
| hCV27484761 | rs3783886 | PTPN21 | ADD | G | | 0.17 | | | | | |
| hCV27484761 | rs3783886 | PTPN21 | DOM | GA or GG | | 0.17 | | | | | |
| hCV27484761 | rs3783886 | PTPN21 | REC | GG | | 0.17 | | | | | |

| | | | | GENO | | | CASE | CONTROL |
|---|---|---|---|---|---|---|---|---|
| SNP hCV # | SNP rs # | Gene | MODE | TYPE | ADJUST | Geno t | cnt | cnt |
| hCV16282389 | rs2726953 | SCARA5 | GEN | AG | sex age | GG | 895 | 887 |
| hCV16282389 | rs2726953 | SCARA5 | GEN | AA | sex age | GG | 895 | 887 |
| hCV16282389 | rs2726953 | SCARA5 | ADD | A | sex age | GG | 895 | 887 |
| hCV16282389 | rs2726953 | SCARA5 | DOM | AG or AA | sex age | GG | 895 | 887 |
| hCV16282389 | rs2726953 | SCARA5 | REC | AA | sex age | GG | 895 | 887 |
| hCV16282389 | rs2726953 | SCARA5 | GEN | AG | | GG | 895 | 887 |
| hCV16282389 | rs2726953 | SCARA5 | GEN | AA | | GG | 895 | 887 |
| hCV16282389 | rs2726953 | SCARA5 | ADD | A | | GG | 895 | 887 |
| hCV16282389 | rs2726953 | SCARA5 | DOM | AG or AA | | GG | 895 | 887 |
| hCV16282389 | rs2726953 | SCARA5 | REC | AA | | GG | 895 | 887 |
| hCV9326428 | rs687289 | ABO | GEN | AG | sex age | GG | 512 | 824 |
| hCV9326428 | rs687289 | ABO | GEN | AA | sex age | GG | 512 | 824 |
| hCV9326428 | rs687289 | ABO | ADD | A | sex age | GG | 512 | 824 |
| hCV9326428 | rs687289 | ABO | DOM | AG or AA | sex age | GG | 512 | 824 |
| hCV9326428 | rs687289 | ABO | REC | AA | sex age | GG | 512 | 824 |
| hCV9326428 | rs687289 | ABO | GEN | AG | | GG | 512 | 824 |
| hCV9326428 | rs687289 | ABO | GEN | AA | | GG | 512 | 824 |
| hCV9326428 | rs687289 | ABO | ADD | A | | GG | 512 | 824 |
| hCV9326428 | rs687289 | ABO | DOM | AG or AA | | GG | 512 | 824 |
| hCV9326428 | rs687289 | ABO | REC | AA | | GG | 512 | 824 |
| hCV15887091 | rs2519093 | ABO | GEN | TC | sex age | CC | 921 | 1181 |
| hCV15887091 | rs2519093 | ABO | GEN | TT | sex age | CC | 921 | 1181 |
| hCV15887091 | rs2519093 | ABO | ADD | T | sex age | CC | 921 | 1181 |
| hCV15887091 | rs2519093 | ABO | DOM | TC or TT | sex age | CC | 921 | 1181 |
| hCV15887091 | rs2519093 | ABO | REC | TT | sex age | CC | 921 | 1181 |
| hCV15887091 | rs2519093 | ABO | GEN | TC | | CC | 921 | 1181 |
| hCV15887091 | rs2519093 | ABO | GEN | TT | | CC | 921 | 1181 |
| hCV15887091 | rs2519093 | ABO | ADD | T | | CC | 921 | 1181 |
| hCV15887091 | rs2519093 | ABO | DOM | TC or TT | | CC | 921 | 1181 |
| hCV15887091 | rs2519093 | ABO | REC | TT | | CC | 921 | 1181 |
| hCV3188439 | rs4981022 | STAB2 | GEN | GA | sex age | AA | 919 | 796 |
| hCV3188439 | rs4981022 | STAB2 | GEN | GG | sex age | AA | 919 | 796 |
| hCV3188439 | rs4981022 | STAB2 | ADD | G | sex age | AA | 919 | 796 |
| hCV3188439 | rs4981022 | STAB2 | DOM | GA or GG | sex age | AA | 919 | 796 |
| hCV3188439 | rs4981022 | STAB2 | REC | GG | sex age | AA | 919 | 796 |
| hCV3188439 | rs4981022 | STAB2 | GEN | GA | | AA | 919 | 796 |
| hCV3188439 | rs4981022 | STAB2 | GEN | GG | | AA | 919 | 796 |
| hCV3188439 | rs4981022 | STAB2 | ADD | G | | AA | 919 | 796 |
| hCV3188439 | rs4981022 | STAB2 | DOM | GA or GG | | AA | 919 | 796 |
| hCV3188439 | rs4981022 | STAB2 | REC | GG | | AA | 919 | 796 |
| hCV3188431 | rs12229292 | STAB2 | GEN | TG | sex age | GG | 961 | 942 |
| hCV3188431 | rs12229292 | STAB2 | GEN | TT | sex age | GG | 961 | 942 |
| hCV3188431 | rs12229292 | STAB2 | ADD | T | sex age | GG | 961 | 942 |
| hCV3188431 | rs12229292 | STAB2 | DOM | TG or TT | sex age | GG | 961 | 942 |
| hCV3188431 | rs12229292 | STAB2 | REC | TT | sex age | GG | 961 | 942 |
| hCV3188431 | rs12229292 | STAB2 | GEN | TG | | GG | 961 | 942 |
| hCV3188431 | rs12229292 | STAB2 | GEN | TT | | GG | 961 | 942 |
| hCV3188431 | rs12229292 | STAB2 | ADD | T | | GG | 961 | 942 |
| hCV3188431 | rs12229292 | STAB2 | DOM | TG or TT | | GG | 961 | 942 |
| hCV3188431 | rs12229292 | STAB2 | REC | TT | | GG | 961 | 942 |
| hCV2485050 | rs6575009 | | GEN | GA | sex age | AA | 1591 | 1551 |
| hCV2485050 | rs6575009 | | GEN | GG | sex age | AA | 1591 | 1551 |
| hCV2485050 | rs6575009 | | ADD | G | sex age | AA | 1591 | 1551 |
| hCV2485050 | rs6575009 | | DOM | GA or GG | sex age | AA | 1591 | 1551 |
| hCV2485050 | rs6575009 | | REC | GG | sex age | AA | 1591 | 1551 |
| hCV2485050 | rs6575009 | | GEN | GA | | AA | 1591 | 1551 |
| hCV2485050 | rs6575009 | | GEN | GG | | AA | 1591 | 1551 |
| hCV2485050 | rs6575009 | | ADD | G | | AA | 1591 | 1551 |
| hCV2485050 | rs6575009 | | DOM | GA or GG | | AA | 1591 | 1551 |
| hCV2485050 | rs6575009 | | REC | GG | | AA | 1591 | 1551 |
| hCV27960688 | rs4900088 | TC2N | GEN | AG | sex age | GG | 537 | 578 |
| hCV27960688 | rs4900088 | TC2N | GEN | AA | sex age | GG | 537 | 578 |
| hCV27960688 | rs4900088 | TC2N | ADD | A | sex age | GG | 537 | 578 |
| hCV27960688 | rs4900088 | TC2N | DOM | AG or AA | sex age | GG | 537 | 578 |
| hCV27960688 | rs4900088 | TC2N | REC | AA | sex age | GG | 537 | 578 |
| hCV27960688 | rs4900088 | TC2N | GEN | AG | | GG | 537 | 578 |
| hCV27960688 | rs4900088 | TC2N | GEN | AA | | GG | 537 | 578 |
| hCV27960688 | rs4900088 | TC2N | ADD | A | | GG | 537 | 578 |
| hCV27960688 | rs4900088 | TC2N | DOM | AG or AA | | GG | 537 | 578 |
| hCV27960688 | rs4900088 | TC2N | REC | AA | | GG | 537 | 578 |
| hCV2889230 | rs11686314 | | GEN | AG | sex age | GG | 1408 | 1303 |
| hCV2889230 | rs11686314 | | GEN | AA | sex age | GG | 1408 | 1303 |
| hCV2889230 | rs11686314 | | ADD | A | sex age | GG | 1408 | 1303 |
| hCV2889230 | rs11686314 | | DOM | AG or AA | sex age | GG | 1408 | 1303 |
| hCV2889230 | rs11686314 | | REC | AA | sex age | GG | 1408 | 1303 |
| hCV2889230 | rs11686314 | | GEN | AG | | GG | 1408 | 1303 |
| hCV2889230 | rs11686314 | | GEN | AA | | GG | 1408 | 1303 |
| hCV2889230 | rs11686314 | | ADD | A | | GG | 1408 | 1303 |
| hCV2889230 | rs11686314 | | DOM | AG or AA | | GG | 1408 | 1303 |
| hCV2889230 | rs11686314 | | REC | AA | | GG | 1408 | 1303 |
| hCV31716902 | rs12999640 | | GEN | TC | sex age | CC | 1358 | 1252 |
| hCV31716902 | rs12999640 | | GEN | TT | sex age | CC | 1358 | 1252 |
| hCV31716902 | rs12999640 | | ADD | T | sex age | CC | 1358 | 1252 |
| hCV31716902 | rs12999640 | | DOM | TC or TT | sex age | CC | 1358 | 1252 |
| hCV31716902 | rs12999640 | | REC | TT | sex age | CC | 1358 | 1252 |
| hCV31716902 | rs12999640 | | GEN | TC | | CC | 1358 | 1252 |
| hCV31716902 | rs12999640 | | GEN | TT | | CC | 1358 | 1252 |
| hCV31716902 | rs12999640 | | ADD | T | | CC | 1358 | 1252 |
| hCV31716902 | rs12999640 | | DOM | TC or TT | | CC | 1358 | 1252 |
| hCV31716902 | rs12999640 | | REC | TT | | CC | 1358 | 1252 |
| hCV27484761 | rs3783886 | PTPN21 | GEN | GA | sex age | | | |
| hCV27484761 | rs3783886 | PTPN21 | GEN | GG | sex age | | | |
| hCV27484761 | rs3783886 | PTPN21 | ADD | G | sex age | | | |
| hCV27484761 | rs3783886 | PTPN21 | DOM | GA or GG | sex age | | | |
| hCV27484761 | rs3783886 | PTPN21 | REC | GG | sex age | | | |
| hCV27484761 | rs3783886 | PTPN21 | GEN | GA | | | | |
| hCV27484761 | rs3783886 | PTPN21 | GEN | GG | | | | |
| hCV27484761 | rs3783886 | PTPN21 | ADD | G | | | | |
| hCV27484761 | rs3783886 | PTPN21 | DOM | GA or GG | | | | |
| hCV27484761 | rs3783886 | PTPN21 | REC | GG | | | | |

The application's sequence listing, which the Patent Office published only in electronic form, follows.

SEQUENCE LISTING (3098 sequences)

SEQ ID NO: 1 - DNA, 1580 bp, Homo sapiens
ggaggccgagaccagacgcggagccatggccgaggtgttgcggacgctggccggaaaaccaaaatgccacgcacttcgacctatgatccttttcctaataatgcttgtcttggtcttgtttggttacggggtcctaagccccagaagtctaatgccaggaagcctggaacgggggttctgcatggctgttagggaacctgaccatctgcagcgcgtctcgttgccaaggatggtctacccccagccaaaggtgctgacaccgtgtaggaaggatgtcctcgtggtgaccccttggctggctcccattgtctgggagggcacattcaacatcgacatcctcaacgagcagttcaggctccagaacaccaccattgggttaactgtgtttgccatcaagaaatacgtggctttcctgaagctgttcctggagacggcggagaagcacttcatggtgggccaccgtgtccactactatgtcttcaccgaccagccggccgcggtgccccgcgtgacgctggggaccggtcggcagctgtcagtgctggaggtgcgcgcctacaagcgctggcaggacgtgtccatgcgccgcatggagatgatcagtgacttctgcgagcggcgcttcctcagcgaggtggattacctggtgtgcgtggacgtggacatggagttccgcgaccacgtgggcgtggagatcctgactccgctgttcggcaccctgcaccccggcttctacggaagcagccgggaggccttcacctacgagcgccggccccagtcccaggcctacatccccaaggacgagggcgatttctactacctgggggggttcttcggggggtcggtgcaagaggtgcagcggctcaccagggcctgccaccaggccatgatggtcgaccaggccaacggcatcgaggccgtgtggcacgacgagagccacctgaacaagtacctgctgcgccacaaacccaccaaggtgctctcccccgagtacttgtgggaccagcagctgctgggctggcccgccgtcctgaggaagctgaggttcactgcggtgcccaagaaccaccaggcggtccggaacccgtgagcggctgccaggggctctgggagggctgccggcagccccgtccccctcccgcccttggttttagcagaacgggtaaactctgtttcctttgtccgtcctgttgtgagtaactgaagcctaggccccgtccccacctcaaatcacacacaccccctccccaccacagagacaccattacatacacagacacacacagaaagacacacacagacacaaaatcacacacacaccctccccgccacagagacaccattacatacacagacacacacagaaagacacagacacaaaatcacacacacaccctccccgccacagagacacaccattacatacacagacacgcaatcgcagatacgcccttccggccacagaaacacaccattacacacacatacacagaaagacacacacagacacacaatcacacgcagcccctccccgccacagagacacaccattacatacacagacacacacagaaagacac

SEQ ID NO: 2 - DNA, 11373 bp, Homo sapiens
gtgcgcggggcggcgccgcggaacatgacggcgccctgggtggccctcgccctcctctggggatcgctgtgcgccggctctgggcgtggggaggctgagacacgggagtgcatctactacaacgccaactgggagctggagcgcaccaaccagagcggcctggagcgctgcgaaggcgagcaggacaagcggctgcactgctacgcctcctggcgcaacagctctggcaccatcgagctcgtgaagaagggctgctggctagatgacttcaactgctacgataggcaggagtgtgtggccactgaggagaacccccaggtgtacttctgctgctgtgaaggcaacttctgcaacgaacgcttcactcatttgccagaggctgggggcccggaagtcacgtacgagccacccccgacagcccccaccctgctcacggtgctggcctactcactgctgcccatcgggggcctttccctcatcgtcctgctggccttttggatgtaccggcatcgcaagcccccctacggtcatgtggacatccatgaggaccctgggcctccaccaccatcccctctggtgggcctgaagccactgcagctgctggagatcaaggctcgggggcgctttggctgtgtctggaaggcccagctcatgaatgactttgtagctgtcaagatcttcccactccaggacaagcagtcgtggcagagtgaacgggagatcttcagcacacctggcatgaagcacgagaacctgctacagttcattgctgccgagaagcgaggctccaacctcgaagtagagctgtggctcatcacggccttccatgacaagggctccctcacggattacctcaaggggaacatcatcacatggaacgaactgtgtcatgtagcagagacgatgtcacgaggcctctcatacctgcatgaggatgtgccctggtgccgtggcgagggccacaagccgtctattgcccacagggactttaaaagtaagaatgtattgctgaagagcgacctcacagccgtgctggctgactttggcttggctgttcgatttgagccagggaaacctccaggggacacccacggacaggtaggcacgagacggtacatggctcctgaggtgctcgagggagccatcaacttccagagagatgccttcctgcgcattgacatgtatgccatggggttggtgctgtgggagcttgtgtctcgctgcaaggctgcagacggacccgtggatgagtacatgctgccctttgaggaagagattggccagcacccttcgttggaggagctgcaggaggtggtggtgcacaagaagatgaggcccaccattaaagatcactggttgaaacacccgggcctggcccagctttgtgtgaccatcgaggagtgctgggaccatgatgcagaggctcgcttgtccgcgggctgtgtggaggagcgggtgtccctgattcggaggtcggtcaacggcactacctcggactgtctcgtttccctggtgacctctgtcaccaatgtggacctgccccctaaagagtcaagcatctaagcccaggacatgagtgtctgtccagactcagtggatctgaagaaaaaaggaaaaaaagttgtgttttgttttggaaatcccataaaaccaacaaacacataaaatgcagctgctattttaccttgactttttattattattattataattattataattattattattaatattattttttggattggatcagtttttaccagcatattgctctactgtatcacaaacagcggacacgtcagcaggcgttgaggtgctgagctgtggatgcagaaccagcgccatgctgaagagcctcagccacctcctgtcctttgggattcgtttttcccgctttctctttgtttgtcgtctcagaatctgtgacacaaagaaacccatctcctgtcttaggaaacctaatgctgcaaactctacctagaggaacctttgaagactgttacataagaacataccttcctcagaagaggagtttcctctgccctctgcccttctcccctgcctccctccctcccctccttttattttgttttagtgagcttaagaaacagcagatgtgtctttcacggatctaacgggtgttgtcctgatcgagaaaaaaactgggatgagaatggtttggactggagttggaaggggaggacggtactgggggtagggtttggaacagagctacactggactcgggcacattcggagcagcatcctttagtatggaggctacttctcaggtaaccaggaattgaggggaaggaccttgtggaggccgagcattaacagcaagagcggggtttggagaaagtctgagattgggtgcagccctgacttacctgctggccctgaccagtttcttttcactaacttggccttgggcataggatgaaacattttttctgccctaattttaaaactaggtgagggtagaatcatcacaggttaggaatacattcttcataagacacgatgctgtaaatacccttaatggacgaaaagttgaaatacttttgtttcctcttggagcagttcagggaaatgcccacaggggattgtcctgcacagatagggcaagaggatttcctgggtggagtctgccaaggcctgcctcgctggggaccccagagtcctgcacctctggttccgccccaggtggtgacattactgtccccgttctgtggctcgtggacaagactttctccagaccccttaaagtggtacatattctaaaaaactgtttttctattatgccataaccttgctctagtcagtgaatgttcctaatgctgctgtttcaacatttgaattctttttaatttatgaaacatgctaaattttttttttcaaacaaaacacacacatccacatatacacatgcttcgctatgtggcttccaaggtttaaattttgaaaagtaaaagaattaaaacttcacgaccacagatcacctcaaaccagaaatacctcagaattttctacttatgtaaggtttattatatattttgttagttgtgttgtcttgtagtaagtatattttaatgtaagttggcttttgtgacaaggaagtttaaaagaaatagagaaaaagaaaaaagtttgcatcttctagggagtgctaccatttttgtttgataacgcccccttgtaaataattgtcatcaactgtaggttggctgtctgggccaagtctgggcatttatcagtcttgtttgtgaaggcttttccttctggtttctttagatcattttatttaaaaacagtgcatctcttcatcgtgagggtaggcaaggcgggggccgtggggagaggttgacctgggtgagaactgaagaggccgcctcctcttgggttgtttggagcttcacatgtaattcacatgtaacatgtaacttgatcggtcagtgttcagaatgacaagtaaccccgcttaaacttggtagaaggatggcccttagacctgaatggggtgattttacttgggatttaacttcttcagcaaattaacagcaacgttggaagagatctgtggcgcctctgtgaagcacaccgtgactcaggccagtcttttagtgcagcgtgtctgggagtgaagggttttgcccttgctggtcttggagtccacagtgtgaggggcactgcacatgcctgggcatctacctagtgtgctatgttcagtgtctggggcttactgccccggggtcctttcctctgggtgttggggcacagggtgctatgggaggcccatttgcttccctctcggagctcagtttttgcttcatgggtcaaaatgtgggctggccaagtggttacaggaacagggtttcggtaagctatgttgtctttttttttttttttttttttttttttaatggtttgattttgtgctgtggtattttttttcccttagaataatttttaatggcaaaacaggccttacagcagttgcttttctttaccatttatttctttaagaagctttaaaatatttattgaaaagtgccatatctaatttctttagctttcgcctcaggcagtgcaggcatctttacttttcatcctcagaagaaacaaacgactaacaaatgtagcaaatttactgcaggaatagttaggtcatgatactacctgaacactaaaccccagcctctttgtttggttttagttcctctgggtggtttttcttttgtgtgctggcttgattcttgtgagaagttttgacctggccaagggagggttgagccatggttctggtgtgggactttgcggtcaagacacagtacagacaggtcaggcctgcgtgccttttctctgggtggcctccccgttaggcccaccgtacgctcagccactatagtgtccctgtggggccttgccatcagattgtgtgtcaggagatggtacctttttggtgtggctggggaggagtgtggtccatgccagttctttgggcttcaggccactcttcccctcatgctgtggtgtaaagtgcacccatcaggtggtatatctggttctgatggcaagaagaaggtgggggatctccttatagggcatgggtctaggagcacagatgggccttttgccccgggtaaatgcttgtctgtttgctgtcatgtgttctttgaggagtgagccatctcgagccctgctttgaatttactgggtcatagagcctctgcctgtgctcttttccataatgacttcatgtgacatgcacttttggtgggctcagataattggtttctttttgtttttgacctcaggctctgtggcagactggggaaaatggggcctggcatcattttccctgtcaatgggaggggctgttccatgcagggtgggaggggaccaagttagcagagagtagccaaggatccttgcttcttcctttctagtgtgctgtcatccaagcaggctcctggctgtagggatgggccttggggaagaatcttctttgaaagcatctatgataactgagaagtcatccctagttggagaaatccagtaatgagcagaaggaggaagcaagtgaggacagaggccattgtattacagtgtcacgcagagggccctcaatgatggggcattggggaaggctgtagacatagtcatcagaacatcctggcctggcataagctgggttttctcctgggaccattggtcctcagcaggagttctttgcatgagttgctcaggggcaagggctgcaagtgggctgtgcttaggagaaagtgacacctggcagtgagggaagatggtgagcattattagcctttgttgtccagcatggccttcttgtcctgtctgctctggagaggagcctgtgggaccagtcctgcctggggagggcatacccacacgtgccagctgattctgactctgaatacatcatgtccggacttgggggtgtttctgcagaaaaaggaggttgtttttcagccttgaacatcttcaggaggatagagactcttgctcacatattcttagcaaagggaagggtctctcatctccaggccacagagatagttcttccattgccctaagaggctaggctaaccctcttgacataacttagacagcaaagcacttcatcctgtagttgggctctgtcacctttctcttcagttggccacattctcgtttcctccatcctgctatgctttgtgtgctcgggctgtgtgtggggtttttccctggtggaaggaagcccagctgtgtattgaatgtccttcatgtgttgtgtgtggctcagaaagcctgtcacttggcccctgtgctctgagccgtgagggtggggaggtggctgttccattaaagtgggagtattggatggccctcttgaaactagaattttgccttttttagtatgcagtataaagtttccagcatctattggtaacacaaagatttgctggtttttaaaataatacagtaagcataagtatgtaagtttttagaattggtactagaagttggacagctagttattctcgagaactttatttcactagaaaaatatactaattggaaagcagtttccaggagttaactcagtttaattttcagtctcagttattttagcctgttgagtttttgatggcacacctttggagagatggccacgcctgattcccatttcaggggcatcagaccatacctttttaagaagctccgtgaatctagtcatctacccttcatcctgggcgaacagccaaaaagagaaggggacaaggtgtctttttctccttctcactggggtgacatgaattcttttagttaatggctgtttgcaaattctaaactaatgaaatacttagcagctaacatgttcaatctagtaatgatgagtttaaatctcaattgacagtaatgttttagataaacaggcccagtaattcagttgatgaactgtatatcttctcagtctagatttgtaaatgtttaatgaattcagggttataagcatagttctttaagtaagattccagatagttgatttgcaaccagcagtctacctatgaatgtatcccaaacctttagaagattggaaaagatttttgaaataatgatttagttttgtaggaaaaacacccccttgaaaattaattcggttgacccagtaacattttttaaaacaattggtggctccaaaaggcctgccaacaaagaaaagtccaaattatctagtgggacattttgaatgttttatgtttattttgggtccactgtaaactttggttcaaaaaagaatttgaatttaaagaatttaccattatttaaattattaccaagtttttacattttcatgatggtattttccaggtatgaatgaaacatgactttttgattgtggtacttcctgtatcccctgtagtgccaaaaccagtgatactttatttgctcctatggcagctcatagaggtaaccgaagtgatttttcctcagtaattgaaacacatattctctaaatgccaatgtgtggtgatgggccctgcactgccttcatttctctagggcagtgtctttggattgtctagggcctaggtaattctgagaactactgtaaaccaaccacagggcactaaagcaatgtacacaccactctttgtgtgtatggaaggggttatataaacctgggctatgctggacatctacagaagagtattacattcacttgcaaagtttacatttttgagctcacagttatgaaaaatatgacccacaagtttttcaggcaggtgaggatgggtcttcttgcaaatgcatgagttctgtcttgagtcctgggaacttctctgttggttgagtgtgggctcattccctgactctcctaatcatgtttgcgtcagaatgttagcattgtaaataaaagaataggttgtataatagatacacaacacttgaaactttactttaaaaaaatcgatagttctacatatatatttagttatatcacttgacagatttcttctacacagtgtggagattgttttataccacagattatttttataaagttagtgaatttgaatgattttgtaatcagagctaatgagctttacctttcaagagaaacgtacactggagcatgagtggtgtggaacttttacttagtgtttatatggattcttgtgatacactggcagactggagtcaatttgcgggtcttttttggccaaaactccacttgtggttgtgtaggacagtgatattcagctcagcttcttgtggattgggaggagagagggcctgcaatgtgttttacattggtgcttcctcctgagatttctgttgaacaaagggttctgaggtcaaaaattagtttgtaagcctttgccataggacatagtcatgtgagagtgtttgggggaacagaaattgtataggggtgcctattggggtgggatgggactcgaataagattcaggtacaaaaactttgaaatgagaatctggtggtttgagtaatccaccagactgaattatctaagatcacattatccaggttggggggcagaattacccagttaagtaattgttcagaaaagtggggagggtggcatgtggatgcagtgatccaattaaatggagagctgccaggcacattttgtcctctctggtcagtgagaatggttgggttggctcgctgcttcaatctgtggaatcagccaggagcccagtgaggaagctcagaaccccagtaacagcagagcatctttcagatagctccagagttttcctgcttttctgaggaagctcagcatcactgccacaatacggaaagtggtcttcattttagcctatttatttttaggcagagagtggatggttatttgtgtgggacttttggtggcgatatataatgaataattaagttaatttctggtatgcataatggccagtcctgaggcccagctgaagacctgtcccccagaccctgcccgctggcttcaggctgctgcttctagacagaggtgcactggacgggatagttttatcaagagaatccctaatgtgtcattttaaaccagctgtgctttttattcattctggttgagcgtataggtttacactttaccctttttatacttggaataaatttagttccagcagatctagtagcactccagaaaccaaccccatctgttccccataaaaagaacattttctctgctctccagccacgtgtcttggaatgtaattctgttgtgcctttgtttttatcactctcttcgccccaaaagcaactgctgtaagcttttttctacttgtcttttctagtccccaacctctacctttttcctttttcccagccctaatttctggatgcacttctgtgatccaggtattttaagaaccagttacctcagacctcatgttgaacagtgtcgccatctgggtcctcttgatactgcagacttttaacgtacacatgcaggaaccctgctgagcgtgggcacttgttttaaagcaaaactcttcccaaggactgaagaaagggcttctggcaagctcgtcatggcattgtggtgggatgggtctagagtgtcatctgaatggtgcttcctgtgttcctctttgaattctgccattttcagtattcttgtgtgtctgaataggcaaagcgatttaattggctggtcttgcacgcaaattagttccaaagataagctctttgtaacacatttccagtcgctaatgctcaaatgtagaacattcctttaaatggcaggataaaaaacccactatccaccatagtgcattttgggaagatgtctgtagcatatgttgctgtgaaattaggccttgtgggatatggctgtttgtcattttgatgtattttaaataaatatatatattttttaaagagccttttttaccagttcaaaaagtttaattaaccagcagtcaccgcatctgaatttttgtctctggggcatagatggcagaccaagattaaaagtggtaactcagctatacgagcatgggctaccttcctgggctctcctgcagtcctgtagacctgctgttccgcagaccatgggacacaaggtcagtgtgttcccagtgagggtcccaagtcagtcatcttaagtgtttgttctctgccccattcagtggactgttgacttcagtccctgcaagtgctttagcccgagtggggttttctcagagcactgccacgagttaagtgtgtgtttagccaaataatttctccgtaagggaaaaatgcagtcacccaaattttaccaacaatgacagagatgagagtagaaaagattaggcaacatctgagttttaacttgaaaagtgtccaagtcatcatgaaaggccgactgggagcaagtgattattagagattcttcaggagacctcatctgaaaatgttaagactgccagtgagggaaggaattgttaaaatgccagcggcttttttttcctctttttttctgtaattctgtaaaaatgcagagaaagttgagtggtacttcagaattgagggagagggttaccgcagagtagaaatatatttctagatttcagttccacaccacaaatccacaacaatgccatttttcaactgtacaaaaatctgcttatgaactggacatgatcttaatggtagtgtcaaaggccaagtttttcacctgttaatatttttccacatttgtccttgaatctgaataactttatacagtactgtaaatttaacttacatcgagtttgttgtcaattcttatgaaaagagctttctgcatgtaacacatacggttaaagaacacagcaaaggacaaaatttgcaggaacagttttggaaccaacagaaaatgtcaccttttatttgccatcttatatatatctatcagttttaccagctacttctaaatttgtacattatttgtaagggaaagaaggaaaaccctaagacttgtctaacttagtggagaatgtgtgtgttgggcttaggatggatagctaagtcttattgagctgtgttacctaacttgtatataaaaattgtaattaaaagtttgggttcacctgtttctcacagtttaaaatgatgagtaattgcaaactctggaaatgtgactagtatatgatttaaggctgtagaagcaaggaagctctttcaagtgctaaaactaaagacttctagtttttggctcaaataagtactgtttgtataccaggatatgtgagatgtaaatgtagtaggtcacttttcacccttgtagctataaaataaaaattttgtagaacagaaatagcttgtactactgaattaacaaaagttatactaaagtatcatgtttaaaaaaaatatatatatatatacagagttaagcttgttgctgttaccctgtctggatttgaaaagtgtgctgatttatatatatatattacacacacacacacacacacacacacacacacacacacacacacacacacacacacacacacacacacacacatacacctaaaatggcctaaagcagacatccatgtaattacagttgcaaaatgaaaacattttggaaagaacattgtatcatagttcattcatttgcagtggatctttgttcctttttactgtggtaattttagaaatgagtgtcaagtttgaaattagatctgctaagttggggttttgctgcttgaactctgcactgggtcctcaaataaaccgatgtgaatgtagttttttccccctgtgtgaagaagcagttacaccccaacaataggaggaaaaatctagaactatttcaagttttatctttttgtatatgaaaataaaataataataaaacaa

SEQ ID NO: 3 - DNA, 1216 bp, Homo sapiens
ggctctgtctttttagcagacgaaaaccactttggtagtgccagtgtgactcatccacaatgatttctccagtgctcatcttgttctcgagttttctctgccatgttgctattgcaggacggacctgtcccaagccagatgatttaccattttccacagtggtcccgttaaaaacattctatgagccaggagaagagattacgtattcctgcaagccgggctatgtgtcccgaggagggatgagaaagtttatctgccctctcacaggactgtggcccatcaacactctgaaatgtacacccagagtatgtccttttgctggaatcttagaaaatggagccgtacgctatacgacttttgaatatcccaacacgatcagtttttcttgtaacactgggttttatctgaatggcgctgattctgccaagtgcactgaggaaggaaaatggagcccggagcttcctgtctgtgctcccatcatctgccctccaccatccatacctacgtttgcaacacttcgtgtttataagccatcagctggaaacaattccctctatcgggacacagcagtttttgaatgtttgccacaacatgcgatgtttggaaatgatacaattacctgcacgacacatggaaattggactaaattaccagaatgcagggaagtaaaatgcccattcccatcaagaccagacaatggatttgtgaactatcctgcaaaaccaacactttattacaaggataaagccacatttggctgccatgatggatattctctggatggcccggaagaaatagaatgtaccaaactgggaaactggtctgccatgccaagttgtaaagcatcttgtaaagtacctgtgaaaaaagccactgtggtgtaccaaggagagagagtaaagattcaggaaaaatttaagaatggaatgctacatggtgataaagtttctttcttctgcaaaaataaggaaaagaagtgtagctatacagaggatgctcagtgtatagatggcactatcgaagtccccaaatgcttcaaggaacacagttctctggctttttggaaaactgatgcatccgatgtaaagccatgctaaggtggttttcagattccacacaaaatgtcacacttgtttcttgttcatccaaggaacctaattgaaatttaaaaataaagctactgaatttattgccgcacccaaaaaaaaaaaaaaaa

SEQ ID NO: 4 - DNA, 4288 bp, Homo sapiens
cttgagaaagagagcgatagagtgcgagagcgagtgcccggagcatcctggccctgagacagctgggccagccccgcagggctctgcagcatgtgggagctccgctccatagccttctccagggctgtgttcgcagagttcctggccacactcctcttcgtcttctttggcctcggctctgccctcaactggccacaggccctgccctctgtgctacagattgccatggcgtttggcttgggtattggcaccctggtacaggctctgggccacataagcggggcccacatcaaccctgccgtgactgtggcctgcctggtgggctgccacgtctccgttctccgagccgccttctacgtggctgcccagctgctgggggctgtggccggagccgctctgctccatgagatcacgccagcagacatccgcggggacctggctgtcaatgctctcagcaacagcacgacggctggccaggcggtgactgtggagctcttcctgacactgcagctggtgctctgcatcttcgcctccaccgatgagcgccgcggagagaacccgggcacccctgctctctccataggcttctccgtggccctgggccacctccttgggatccattacaccggctgctctatgaatcctgcccgctccctggctccagctgtcgtcactggcaaatttgatgaccactgggtcttctggatcggacccctggtgggcgccatcctgggctccctcctctacaactacgtgctgtttccgccagccaagagcctgtcggagcgcctggcagtgctgaagggcctggagccggacaccgattgggaggagcgcgaggtgcgacggcggcagtcggtggagctgcactcgccgcagagcctgccacggggtaccaaggcctgagggccgccagcggcctctaaggccccgacggacgcttgtgaggcccgaggcagaagggcccaccccgtccctcctctcccgcaggtctgaagttggccccccagcgcagagtagctgcttcctggacgtgcgcgcccaggccagtgctgtgagcaggcggggaggaggctgccggagggagccctgagcctggcaggtcccctgccctgaggctgtgagcagctagtggtggcttctccagcctttttcagggaactgggaacttaggggactgagctggggagggaggcaggtgggtggtaagagggaaactctggagagcctgcacccaggtactgagtggggagtgtacagacccctgccttgggggttccgggaatgatgcaactggttttactagtgtgcaagtgtgttcatccccaagttctcttttgtcctcacatgcagagttgtgcatgcccctgagtgtgaacaggtttgcctacgttggtgcaagtgtgcatggctggggacttctcacttccccttgcaccccttcctccccaacctgcaataaatccgcttctcctgcagtggatgagtgtgggtgccagtcctcctcaggagaaggggaagggaaggaggccactttgagagggctgaagggagggccttgatttccagccgcaatctggctcctcctggaaaatttcccccacctgcagcgctgggccccaaggcttgccaagactcattgctggaggtagagaggtgtcaaccagagaacagctcccctagacatggcctctggaaaaaggaaatctttggtggccaaagatttcctttctgtggtgagggagaacctctccaaagaggaagcaggcatatgagtgcgcacgccttcacgtgtgtgtatgctgtgtgtgcccgggacccccgtctccaggggtgccccagacccagagattagcctcccacttcggcgcagaaaacaaaagccctttgtgggacccgggcctttgtcttgggtgaggggagatttgcacctagacacttcttgaaaggagacactcagtttcacaagtgagccctcttgcccagcacacacctatggctggctgggcaaggcgctcaggcatgcaaccatgggcaccaggcaatacccatccatcacccatctcactctccccagtcctcaggcagcagcttttccaccccaggaatctctgttccttctctgtctgcctctccacagcccgtgatcccctgcttctggctcctaccactggacagtcattgtggatagagcagcctgctgctctcaggaccagagaagggaaatgacttctccaggcagaggcagatctgagtctagaacccaggcttctaaatttctaggccagtactactgctctcaaaagagattaactgggattaagtgagatgacgcatgtaaagatgctgtgtaaactgtaattcttaataccattatcacgcattactagaatcatttcattatttctgcttcctgggggaaggatgcagaaggagtctgatgctcaacatcccttacctcctttcgttgatggccaaagcaaaggagagtcctgggagcccacaagatccaggcagaaggagatgggtttggggctggccccatcctggcccagcctcttaacctcttcttaccctgaatgtgtgccctatcttttctcccacctccttcctcctaccacccagccctatccattctctccttccctctccagcctgctgtataagtaacatgtgggtcataccttgaacccccctccgcccccatgctctctgtggcctccatgccttcaagacttctgtctgtatctatctcacactgcaccaagcacccactgtgcaccaggcactaagtctctagcctctttctcccttctgctcccatccaagaaagacagtgtataaggaacatctctgtaattgtgtcccctctcatctatgctctttcctgtcttccttgaccaaagctctctttgaggtccaaaaaaggctgccctgggccatatgtgctatggagaggactctcccaaacccccaatagctagtgacagccacttggcctcactaccagaagaagggtggagtcagaaaccaaagtgacctccagagctgtcctcctggcacctgagtgtccttgctctagaggttcaaaggcagcaaggcagtgagctatgagcccagcatggatgtgtctcaggcacctcatccccaccccacctcaccccaacaaactcctctagaagaagccaagaatttctctctatgtctgtttcactttttggattgcatctccccaaaaactaaatgtgaaatccctaccatttctagcctctattgcccagattggagtcagaggtcaaaaaaggattccaagtgatggaactccaggggtggagggaaattggcagttcctggcatctcttgtgtaccagctgctgtgctgggtgccttgcatgcacggacttatctgatcttcctcaaacttcagataggttagggaaggacaaaggcccccagccatgaagggttttgctatttccaaagcttccccttatcgtcccctgtgattatctcccaaccccgtgacaaaggtagagcaaatattgttcttcccattttacagattcagaaaccaaggctaagggactggtctaaagtctcacaggtagtatatggtggagccaacacttgaactcagacctttttacacaaaatcccatgatttttccactgagacaaatcctaggctcctgggaggccctggcagaagccagaacacatggctgggcctttccagcccaacccactgtcttgcagtggacggagagccttggcgagggcagcagggtagagaggacaaagaatgtggggctggtttctgccctttaagagcacccggtcagtcagagaacagagatcacacacaccaaaccagacagaggcagggcagcatggagacaggtagacagacctccaggtccctaagctggggacagagaaggttctgagctgtcccatactcccactttgtgccaaatgactttgcacctgcaaatggtgcttcaatgtcgttttgtatctttaagctgtgatgttgtatatatacaatgcctcccagctagactgtaagccctttggggacaagggctgcttccagttcttggatggcgttctcctatctaccttccttcaactgctctgcatataataagcactcaataaatgctcatttgccaataaaaaaaaaaaaaaaaaaaaaaaaaaaaaaaaaaaaaaaaaaaaaaaaaaaaaaaaaaaaaaaaaaaaaaaaaaaaaaaaaaaaaaaaaaaaaaaaaaaaaaaaaaaaaaa

SEQ ID NO: 5 - DNA, 2485 bp, Homo sapiens
agtgcaacccagagggcaggatttcctgctggactttgaaatccaacccggtcacctacccgcgcgactgtgtccacggatggcacgaaagccaagcgagtccccctgccgagctactcgcgtccgcctcctcccaagctgagctctgctccgcccacctgagtccttcgccagttaggaggaaacacagccgcttaatgaactgctgcatcgggctgggagagaaagctcgcgggtcccaccgggcctcctacccaagtctcagcgcgcttttcaccgaggcctcaattctgggatttggcagctttgctgtgaaagcccaatggacagaggactgcagaaaatcaacctatcctccttcaggaccaactgtcttccctgctgttataaggtacagaggtgcagttccatggtacaccataaatcttgacttaccaccctacaaaagatggcatgaattgatgcttgacaaggcaccagtgcctggcctacttggcaactttcctggcccttttgaagaggaaatgaagggtattgccgctgttactgatatacctttaggagagattatttcattcaatattttttatgaattatttaccatttgtacttcaatagtagcagaagacaaaaaaggtcatctaatacatgggagaaacatggattttggagtatttcttgggtggaacataaataatgatacctgggtcataactgagcaactaaaacctttaacagtgaatttggatttccaaagaaacaacaaaactgtcttcaaggcttcaagctttgctggctatgtgggcatgttaacaggattcaaaccaggactgttcagtcttacactgaatgaacgtttcagtataaatggtggttatctgggtattctagaatggattctgggaaagaaagatgtcatgtggatagggttcctcactagaacagttctggaaaatagcacaagttatgaagaagccaagaatttattgaccaagaccaagatattggccccagcctactttatcctgggaggcaaccagtctggggaaggttgtgtgattacacgagacagaaaggaatcattggatgtatatgaactcgatgctaagcagggtagatggtatgtggtacaaacaaattatgaccgttggaaacatcccttcttccttgatgatcgcagaacgcctgcaaagatgtgtctgaaccgcaccagccaagagaatatctcatttgaaaccatgtatgatgtcctgtcaacaaaacctgtcctcaacaagctgaccgtatacacaaccttgatagatgttaccaaaggtcaattcgaaacttacctgcgggactgccctgacccttgtataggttggtgagcacacgtctggcctacagaatgcggcctctgagacatgaagacaccatctccatgtgaccgaacactgcagctgtctgaccttccaaagactaagactcgcggcaggttctctttgagtcaatagcttgtcttcgtccatctgttgacaaatgacagatcttttttttttccccctatcagttgatttttcttatttacagataacttctttaggggaagtaaaacagtcatctagaattcactgagttttgtttcactttgacatttggggatctggtgggcagtcgaaccatggtgaactccacctccgtggaataaatggagattcagcgtgggtgttgaatccagcacgtctgtgtgagtaacgggacagtaaacactccacattcttcagtttttcacttctacctacatatttgtatgtttttctgtataacagccttttccttctggttctaactgctgttaaaattaatatatcattatctttgctgttattgacagcgatataattttattacatatgattagagggatgagacagacattcacctgtatatttcttttaatgggcacaaaatgggcccttgcctctaaatagcactttttggggttcaagaagtaatcagtatgcaaagcaatcttttatacaataattgaagtgttccctttttcataattactctacttcccagtaaccctaaggaagttgctaacttaaaaaactgcatcccacgttctgttaatttagtaaataaacaagtcaaagacttgtggaaaataggaagtgaacccatattttaaattctcataagtagcattcatgtaataaacaggtttttagtttgttcttcagattgatagggagttttaaagaaattttagtagttactaaaattatgttactgtatttttcagaaatcaaactgcttatgaaaagtactaatagaacttgttaacctttctaaccttcacgattaactgtgaaatgtacgtcatttgtgcaagaccgtttgtccacttcattttgtataatcacagttgtgttcctgacactcaataaacagtcactggaaagagtgccagtcagcagtcatgcacgctgattgggtgtgt

SEQ ID NO: 6 - DNA, 2018 bp, Homo sapiens
gtcaggacagacaattcctcagtgacccaggagctgacacactatggcgcacgtccgaggcttgcagctgcctggctgcctggccctggctgccctgtgtagccttgtgcacagccagcatgtgttcctggctcctcagcaagcacggtcgctgctccagcgggtccggcgagccaacaccttcttggaggaggtgcgcaagggcaacctggagcgagagtgcgtggaggagacgtgcagctacgaggaggccttcgaggctctggagtcctccacggctacggatgtgttctgggccaagtacacagcttgtgagacagcgaggacgcctcgagataagcttgctgcatgtctggaaggtaactgtgctgagggtctgggtacgaactaccgagggcatgtgaacatcacccggtcaggcattgagtgccagctatggaggagtcgctacccacataagcctgaaatcaactccactacccatcctggggccgacctacaggagaatttctgccgcaaccccgacagcagcaccacgggaccctggtgctacactacagaccccaccgtgaggaggcaggaatgcagcatccctgtctgtggccaggatcaagtcactgtagcgatgactccacgctccgaaggctccagtgtgaatctgtcacctccattggagcagtgtgtccctgatcgggggcagcagtaccaggggcgcctggcggtgaccacacatgggctcccctgcctggcctgggccagcgcacaggccaaggccctgagcaagcaccaggacttcaactcagctgtgcagctggtggagaacttctgccgcaacccagacggggatgaggagggcgtgtggtgctatgtggccgggaagcctggcgactttgggtactgcgacctcaactattgtgaggaggccgtggaggaggagacaggagatgggctggatgaggactcagacagggccatcgaagggcgtaccgccaccagtgagtaccagactttcttcaatccgaggacctttggctcgggagaggcagactgtgggctgcgacctctgttcgagaagaagtcgctggaggacaaaaccgaaagagagctcctggaatcctacatcgacgggcgcattgtggagggctcggatgcagagatcggcatgtcaccttggcaggtgatgcttttccggaagagtccccaggagctgctgtgtggggccagcctcatcagtgaccgctgggtcctcaccgccgcccactgcctcctgtacccgccctgggacaagaacttcaccgagaatgaccttctggtgcgcattggcaagcactcccgcaccaggtacgagcgaaacattgaaaagatatccatgttggaaaagatctacatccaccccaggtacaactggcgggagaacctggaccgggacattgccctgatgaagctgaagaagcctgttgccttcagtgactacattcaccctgtgtgtctgcccgacagggagacggcagccagcttgctccaggctggatacaaggggcgggtgacaggctggggcaacctgaaggagacgtggacagccaacgttggtaaggggcagcccagtgtcctgcaggtggtgaacctgcccattgtggagcggccggtctgcaaggactccacccggatccgcatcactgacaacatgttctgtgctggttacaagcctgatgaagggaaacgaggggatgcctgtgaaggtgacagtgggggaccctttgtcatgaagagcccctttaacaaccgctggtatcaaatgggcatcgtctcatggggtgaaggctgtgaccgggatgggaaatatggcttctacacacatgtgttccgcctgaagaagtggatacagaaggtcattgatcagtttggagagtagggggccactcatattctgggctcctggaaccaatcccgtgaaagaattatttttgtgtttctaaaactatggttcccaataaaagtgactctcagcgaaaaaaaaa

SEQ ID NO: 7 - DNA, 2883 bp, Homo sapiens
acgctgctccttcggtttccctgaaacctaacccgccctggggaggcgcgcagcagaggctccgattcggggcaggtgagaggctgactttctctcggtgcgtccagtggagctctgagtttcgaatcggcggcggcggattccccgcgcgcccggcgtcggggcttccaggaggatgcggagccccagcgcggcgtggctgctgggggccgccatcctgctagcagcctctctctcctgcagtggcaccatccaaggaaccaatagatcctctaaaggaagaagccttattggtaaggttgatggcacatcccacgtcactggaaaaggagttacagttgaaacagtcttttctgtggatgagttttctgcatctgtcctcactggaaaactgaccactgtcttccttccaattgtctacacaattgtgtttgtggtgggtttgccaagtaacggcatggccctgtgggtctttcttttccgaactaagaagaagcaccctgctgtgatttacatggccaatctggccttggctgacctcctctctgtcatctggttccccttgaagattgcctatcacatacatggcaacaactggatttatggggaagctctttgtaatgtgcttattggctttttctatggcaacatgtactgttccattctcttcatgacctgcctcagtgtgcagaggtattgggtcatcgtgaaccccatggggcactccaggaagaaggcaaacattgccattggcatctccctggcaatatggctgctgattctgctggtcaccatccctttgtatgtcgtgaagcagaccatcttcattcctgccctgaacatcacgacctgtcatgatgttttgcctgagcagctcttggtgggagacatgttcaattacttcctctctctggccattggggtctttctgttcccagccttcctcacagcctctgcctatgtgctgatgatcagaatgctgcgatcttctgccatggatgaaaactcagagaagaaaaggaagagggccatcaaactcattgtcactgtcctggccatgtacctgatctgcttcactcctagtaaccttctgcttgtggtgcattattttctgattaagagccagggccagagccatgtctatgccctgtacattgtagccctctgcctctctacccttaacagctgcatcgacccctttgtctattactttgtttcacatgatttcagggatcatgcaaagaacgctctcctttgccgaagtgtccgcactgtaaagcagatgcaagtatccctcacctcaaagaaacactccaggaaatccagctcttactcttcaagttcaaccactgttaagacctcctattgagttttccaggtcctcagatgggaattgcacagtaggatgtggaacctgtttaatgttatgaggacgtgtctgttatttcctaatcaaaaaggtctcaccacataccatgtggatgcagcacctctcaggattgctaggagctcccctgtttgcatgagaaaagtagtcccccaaattaacatcagtgtctgtttcagaatctctctactcagatgaccccagaaactgaaccaacagaagcagacttttcagaagatggtgaagacagaaacccagtaacttgcaaaaagtagacttggtgtgaagactcacttctcagctgaaattatatatatacacatatatatattttacatctgggatcatgatagacttgttagggcttcaaggccctcagagatgatcagtccaactgaacgaccttacaaatgaggaaaccaagataaatgagctgccagaatcaggtttccaatcaacagcagtgagttgggattggacagtagaatttcaatgtccagtgagtgaggttcttgtaccacttcatcaaaatcatggatcttggctgggtgcggtgcctcatgcctgtaatcctagcactttgggaggctgaggcaggcaatcacttgaggtcaggagttcgagaccagcctggccatcatggcgaaacctcatctctactaaaaatacaaaagttaaccaggtgtgtggtgcacgtttgtaatcccagttactcaggaggctgaggcacaagaattgagtatcactttaactcaggaggcagaggttgcagtgagccgagattgcaccactgcactccagcttgggtgataaaataaaataaaatagtcgtgaatcttgttcaaaatgcagattcctcagattcaataatgagagctcagactgggaacagggcccaggaatctgtgtggtacaaacctgcatggtgtttatgcacacagagatttgagaaccattgttctgaatgctgcttccatttgacaaagtgccgtgataatttttgaaaagagaagcaaacaatggtgtctcttttatgttcagcttataatgaaatctgtttgttgacttattaggactttgaattatttctttattaaccctctgagtttttgtatgtattattattaaagaaaaatgcaatcaggattttaaacatgtaaatacaaattttgtataacttttgatgacttcagtgaaattttcaggtagtctgagtaatagattgttttgccacttagaatagcatttgccacttagtattttaaaaaataattgttggagtatttattgtcagttttgttcacttgttatctaatacaaaattataaagccttcagagggtttggaccacatctctttggaaaatagtttgcaacatatttaagagatacttgatgccaaaatgactttatacaacgattgtatttgtgacttttaaaaataattattttattgtgtaattgatttataaataacaaaattttttttacaactta

SEQ ID NO: 8 - DNA, 9179 bp, Homo sapiens
gcaagaactgcaggggaggaggacgctgccacccacagcctctagagctcattgcagctgggacagcccggagtgtggttagcagctcggcaagcgctgcccaggtcctggggtggtggcagccagcgggagcaggaaaggaagcatgttcccaggctgcccacgcctctgggtcctggtggtcttgggcaccagctgggtaggctgggggagccaagggacagaagcggcacagctaaggcagttctacgtggctgctcagggcatcagttggagctaccgacctgagcccacaaactcaagtttgaatctttctgtaacttcctttaagaaaattgtctacagagagtatgaaccatattttaagaaagaaaaaccacaatctaccatttcaggacttcttgggcctactttatatgctgaagtcggagacatcataaaagttcactttaaaaataaggcagataagcccttgagcatccatcctcaaggaattaggtacagtaaattatcagaaggtgcttcttaccttgaccacacattccctgcggagaagatggacgacgctgtggctccaggccgagaatacacctatgaatggagtatcagtgaggacagtggacccacccatgatgaccctccatgcctcacacacatctattactcccatgaaaatctgatcgaggatttcaactcggggctgattgggcccctgcttatctgtaaaaaagggaccctaactgagggtgggacacagaagacgtttgacaagcaaatcgtgctactatttgctgtgtttgatgaaagcaagagctggagccagtcatcatccctaatgtacacagtcaatggatatgtgaatgggacaatgccagatataacagtttgtgcccatgaccacatcagctggcatctgctgggaatgagctcggggccagaattattctccattcatttcaacggccaggtcctggagcagaaccatcataaggtctcagccatcacccttgtcagtgctacatccactaccgcaaatatgactgtgggcccagagggaaagtggatcatatcttctctcaccccaaaacatttgcaagctgggatgcaggcttacattgacattaaaaactgcccaaagaaaaccaggaatcttaagaaaataactcgtgagcagaggcggcacatgaagaggtgggaatacttcattgctgcagaggaagtcatttgggactatgcacctgtaataccagcgaatatggacaaaaaatacaggtctcagcatttggataatttctcaaaccaaattggaaaacattataagaaagttatgtacacacagtacgaagatgagtccttcaccaaacatacagtgaatcccaatatgaaagaagatgggattttgggtcctattatcagagcccaggtcagagacacactcaaaatcgtgttcaaaaatatggccagccgcccctatagcatttaccctcatggagtgaccttctcgccttatgaagatgaagtcaactcttctttcacctcaggcaggaacaacaccatgatcagagcagttcaaccaggggaaacctatacttataagtggaacatcttagagtttgatgaacccacagaaaatgatgcccagtgcttaacaagaccatactacagtgacgtggacatcatgagagacatcgcctctgggctaataggactacttctaatctgtaagagcagatccctggacaggcgaggaatacagagggcagcagacatcgaacagcaggctgtgtttgctgtgtttgatgagaacaaaagctggtaccttgaggacaacatcaacaagttttgtgaaaatcctgatgaggtgaaacgtgatgaccccaagttttatgaatcaaacatcatgagcactatcaatggctatgtgcctgagagcataactactcttggattctgctttgatgacactgtccagtggcacttctgtagtgtggggacccagaatgaaattttgaccatccacttcactgggcactcattcatctatggaaagaggcatgaggacaccttgaccctcttccccatgcgtggagaatctgtgacggtcacaatggataatgttggaacttggatgttaacttccatgaattctagtccaagaagcaaaaagctgaggctgaaattcagggatgttaaatgtatcccagatgatgatgaagactcatatgagatttttgaacctccagaatctacagtcatggctacacggaaaatgcatgatcgtttagaacctgaagatgaagagagtgatgctgactatgattaccagaacagactggctgcagcattaggaatcaggtcattccgaaactcatcattgaatcaggaagaagaagagttcaatcttactgccctagctctggagaatggcactgaattcgtttcttcaaacacagatataattgttggttcaaattattcttccccaagtaatattagtaagttcactgtcaataaccttgcagaacctcagaaagccccttctcaccaacaagccaccacagctggttccccactgagacacctcattggcaagaactcagttctcaattcttccacagcagagcattccagcccatattctgaagaccctatagaggatcctctacagccagatgtcacagggatacgtctactttcacttggtgctggagaattcaaaagtcaagaacatgctaagcataagggacccaaggtagaaagagatcaagcagcaaagcacaggttctcctggatgaaattactagcacataaagttgggagacacctaagccaagacactggttctccttccggaatgaggccctgggaggaccttcctagccaagacactggttctccttccagaatgaggccctggaaggaccctcctagtgatctgttactcttaaaacaaagtaactcatctaagattttggttgggagatggcatttggcttctgagaaaggtagctatgaaataatccaagatactgatgaagacacagctgttaacaattggctgatcagcccccagaatgcctcacgtgcttggggagaaagcacccctcttgccaacaagcctggaaagcagagtggccacccaaagtttcctagagttagacataaatctctacaagtaagacaggatggaggaaagagtagactgaagaaaagccagtttctcattaagacacgaaaaaagaaaaaagagaagcacacacaccatgctcctttatctccgaggacctttcaccctctaagaagtgaagcctacaacacattttcagaaagaagacttaagcattcgttggtgcttcataaatccaatgaaacatctcttcccacagacctcaatcagacattgccctctatggattttggctggatagcctcacttcctgaccataatcagaattcctcaaatgacactggtcaggcaagctgtcctccaggtctttatcagacagtgcccccagaggaacactatcaaacattccccattcaagaccctgatcaaatgcactctacttcagaccccagtcacagatcctcttctccagagctcagtgaaatgcttgagtatgaccgaagtcacaagtccttccccacagatataagtcaaatgtccccttcctcagaacatgaagtctggcagacagtcatctctccagacctcagccaggtgaccctctctccagaactcagccagacaaacctctctccagacctcagccacacgactctctctccagaactcattcagagaaacctttccccagccctcggtcagatgcccatttctccagacctcagccatacaaccctttctccagacctcagccatacaaccctttctttagacctcagccagacaaacctctctccagaactcagtcagacaaacctttctccagccctcggtcagatgcccctttctccagacctcagccatacaaccctttctctagacttcagccagacaaacctctctccagaactcagccatatgactctctctccagaactcagtcagacaaacctttccccagccctcggtcagatgcccatttctccagacctcagccatacaaccctttctctagacttcagccagacaaacctctctccagaactcagtcaaacaaacctttccccagccctcggtcagatgcccctttctccagaccccagccatacaaccctttctctagacctcagccagacaaacctctctccagaactcagtcagacaaacctttccccagacctcagtgagatgcccctctttgcagatctcagtcaaattccccttaccccagacctcgaccagatgacactttctccagaccttggtgagacagatctttccccaaactttggtcagatgtccctttccccagacctcagccaggtgactctctctccagacatcagtgacaccacccttctcccggatctcagccagatatcacctcctccagaccttgatcagatattctacccttctgaatctagtcagtcattgcttcttcaagaatttaatgagtcttttccttatccagaccttggtcagatgccatctccttcatctcctactctcaatgatacttttctatcaaaggaatttaatccactggttatagtgggcctcagtaaagatggtacagattacattgagatcattccaaaggaagaggtccagagcagtgaagatgactatgctgaaattgattatgtgccctatgatgacccctacaaaactgatgttaggacaaacatcaactcctccagagatcctgacaacattgcagcatggtacctccgcagcaacaatggaaacagaagaaattattacattgctgctgaagaaatatcctgggattattcagaatttgtacaaagggaaacagatattgaagactctgatgatattccagaagataccacatataagaaagtagtttttcgaaagtacctcgacagcacttttaccaaacgtgatcctcgaggggagtatgaagagcatctcggaattcttggtcctattatcagagctgaagtggatgatgttatccaagttcgttttaaaaatttagcatccagaccgtattctctacatgcccatggactttcctatgaaaaatcatcagagggaaagacttatgaagatgactctcctgaatggtttaaggaagataatgctgttcagccaaatagcagttatacctacgtatggcatgccactgagcgatcagggccagaaagtcctggctctgcctgtcgggcttgggcctactactcagctgtgaacccagaaaaagatattcactcaggcttgataggtcccctcctaatctgccaaaaaggaatactacataaggacagcaacatgcctatggacatgagagaatttgtcttactatttatgacctttgatgaaaagaagagctggtactatgaaaagaagtcccgaagttcttggagactcacatcctcagaaatgaaaaaatcccatgagtttcacgccattaatgggatgatctacagcttgcctggcctgaaaatgtatgagcaagagtgggtgaggttacacctgctgaacataggcggctcccaagacattcacgtggttcactttcacggccagaccttgctggaaaatggcaataaacagcaccagttaggggtctggccccttctgcctggttcatttaaaactcttgaaatgaaggcatcaaaacctggctggtggctcctaaacacagaggttggagaaaaccagagagcagggatgcaaacgccatttcttatcatggacagagactgtaggatgccaatgggactaagcactggtatcatatctgattcacagatcaaggcttcagagtttctgggttactgggagcccagattagcaagattaaacaatggtggatcttataatgcttggagtgtagaaaaacttgcagcagaatttgcctctaaaccttggatccaggtggacatgcaaaaggaagtcataatcacagggatccagacccaaggtgccaaacactacctgaagtcctgctataccacagagttctatgtagcttacagttccaaccagatcaactggcagatcttcaaagggaacagcacaaggaatgtgatgtattttaatggcaattcagatgcctctacaataaaagagaatcagtttgacccacctattgtggctagatatattaggatctctccaactcgagcctataacagacctacccttcgattggaactgcaaggttgtgaggtaaatggatgttccacacccctgggtatggaaaatggaaagatagaaaacaagcaaatcacagcttcttcgtttaagaaatcttggtggggagattactgggaacccttccgtgcccgtctgaatgcccagggacgtgtgaatgcctggcaagccaaggcaaacaacaataagcagtggctagaaattgatctactcaagatcaagaagataacggcaattataacacagggctgcaagtctctgtcctctgaaatgtatgtaaagagctataccatccactacagtgagcagggagtggaatggaaaccatacaggctgaaatcctccatggtggacaagatttttgaaggaaatactaataccaaaggacatgtgaagaactttttcaaccccccaatcatttccaggtttatccgtgtcattcctaaaacatggaatcaaagtattgcacttcgcctggaactctttggctgtgatatttactagaattgaacattcaaaaacccctggaagagactctttaagacctcaaaccatttagaatgggcaatgtattttacgctgtgttaaatgttaacagttttccactatttctctttcttttctattagtgaataaaattttatacaagaagcttttataatgtaactccttgctaccagtaagtaagataatggctattacttctgcattaatttgaatacaggtaggaaaatatcaagaaccaacaagaaaagggcttatctttcttaatgattgaaaatgctatgaagtaatatttatgtagttaaaatgcttcattataactcttttaaatcctttacacactagtaaaacagatattactttaaataataattgatagacctggataactttcacaaacacatgattttttaatggtttttcttgagtgaagagaaaaacaatattatcaaatgaaataagtacttaaaatatcctgtctttcccatataacaatgatttttctgactttccatgagtaaaaaaacagccaagcatctttccagtagccccattgaaattgtgaatccgtcctggtctccctaaggactgcacacattgatattcaaggttggtggtcattagatatggaacagaactgaaataaccatggtagaactgaatgtgtaatgttggctttattctagctggtactacatggcacacagtttcaaaacataatttcacctactggaaagctcagacctgtaaaacagagcatgggaactgctggtctaaatgcagttgttcctgctcaaagagacctctggccaaactggcaagcagttaaagttttctttcagggccttcctctctatggcctcaacttcctcctctctcttcttccagcaacttcccctttcatcattcctttccctggggacttggcattcagtgatcctgtagatattgcacaactggggaacctttagacatccttaaaatcacatgagatagacagtcatttggggtgtctgaaataaaccaccccaaaacttagtgttaaaagagcaaccaaaaaaaatttatgtgagattatggatttgttacttagcttgatttaatcatcctgtaacgtgtacatatatcaaaatgttatgtataccataaatatataaaattttatcaacgaaattcataacaatctctcagaccacagagaaatcaaattagaactgaggactaagaaactcactcgaaaccacacaactacatggaaactgaacaacctgctcctgaatgactactgggtaaataatgaaattaaggcagaaataaataagttccttaaaaccaatgagaacaaagagacaacataccagaatctctaggagacagggctttgcttttgctgcattctattcgttgtgaacacaaattacaggccagtctcgattcagtgtagaagggaactgcataaggaccacataccaggaggcataattcactgggagcatctttagaaactaccagagttacctgttgcccataccagtggggtaagccctatgaatgtatatgagagtttcaaacatccacaaaacattggctttctaatattcgtattcccactattcctttcttttcatgattcatgtcattgtcccatcaacatttctaagatttccattccgttaagagcaaaagagaatgttggaaggtgggggaaaacatttctttgttttctacagggccagcttcttggatgtgtgtgatctgttcagttgcaaagggtcacatgctcagaaggaccgcatgctaaatttaatgctttgcagttaccctcttgaaatcctttattttttaagaaggaattcgacatttccatttttcaatgagccccacaaattacgcagctagtcctgggcttctctactctgaaattgggcaggatctctcttgatctagaatttactaaggcataataggggcaagaaaatcttatgaaataatggggggtagggaagagatgggaatggagcatgagatccagcttcgttattctctacttgagaaaaataaggccccaaagattaaacaacttgcccaaggatattgcttgttagtgtcagaactgaaaccagaaaccaaatgatcatatccctagacttttagtctgctttctcttccataaaatgaaacttataatgtttctaatccattgctcagacaggtagacatgaatattaattgataatgactattaattgatctggaaaatacttgtttggggatcaataatatgtttgggctattatctaatgctgtgtagaaatattaaaacccctgttattttgaaataaaaaagatacccactttt

SEQ ID NO: 9 - DNA, 2802 bp, Homo sapiens
accactttcacaatctgctagcaaaggttatgcagcgcgtgaacatgatcatggcagaatcaccaggcctcatcaccatctgccttttaggatatctactcagtgctgaatgtacagtttttcttgatcatgaaaacgccaacaaaattctgaatcggccaaagaggtataattcaggtaaattggaagagtttgttcaagggaaccttgagagagaatgtatggaagaaaagtgtagttttgaagaagcacgagaagtttttgaaaacactgaaagaacaactgaattttggaagcagtatgttgatggagatcagtgtgagtccaatccatgtttaaatggcggcagttgcaaggatgacattaattcctatgaatgttggtgtccctttggatttgaaggaaagaactgtgaattagatgtaacatgtaacattaagaatggcagatgcgagcagttttgtaaaaatagtgctgataacaaggtggtttgctcctgtactgagggatatcgacttgcagaaaaccagaagtcctgtgaaccagcagtgccatttccatgtggaagagtttctgtttcacaaacttctaagctcacccgtgctgagactgtttttcctgatgtggactatgtaaattctactgaagctgaaaccattttggataacatcactcaaagcacccaatcatttaatgacttcactcgggttgttggtggagaagatgccaaaccaggtcaattcccttggcaggttgttttgaatggtaaagttgatgcattctgtggaggctctatcgttaatgaaaaatggattgtaactgctgcccactgtgttgaaactggtgttaaaattacagttgtcgcaggtgaacataatattgaggagacagaacatacagagcaaaagcgaaatgtgattcgaattattcctcaccacaactacaatgcagctattaataagtacaaccatgacattgcccttctggaactggacgaacccttagtgctaaacagctacgttacacctatttgcattgctgacaaggaatacacgaacatcttcctcaaatttggatctggctatgtaagtggctggggaagagtcttccacaaagggagatcagctttagttcttcagtaccttagagttccacttgttgaccgagccacatgtcttcgatctacaaagttcaccatctataacaacatgttctgtgctggcttccatgaaggaggtagagattcatgtcaaggagatagtgggggaccccatgttactgaagtggaagggaccagtttcttaactggaattattagctggggtgaagagtgtgcaatgaaaggcaaatatggaatatataccaaggtatcccggtatgtcaactggattaaggaaaaaacaaagctcacttaatgaaagatggatttccaaggttaattcattggaattgaaaattaacagggcctctcactaactaatcactttcccatcttttgttagatttgaatatatacattctatgatcattgctttttctctttacaggggagaatttcatattttacctgagcaaattgattagaaaatggaaccactagaggaatataatgtgttaggaaattacagtcatttctaagggcccagcccttgacaaaattgtgaagttaaattctccactctgtccatcagatactatggttctccactatggcaactaactcactcaattttccctccttagcagcattccatcttcccgatcttctttgcttctccaaccaaaacatcaatgtttattagttctgtatacagtacaggatctttggtctactctatcacaaggccagtaccacactcatgaagaaagaacacaggagtagctgagaggctaaaactcatcaaaaacactactccttttcctctaccctattcctcaatcttttaccttttccaaatcccaatccccaaatcagtttttctctttcttactccctctctcccttttaccctccatggtcgttaaaggagagatggggagcatcattctgttatacttctgtacacagttatacatgtctatcaaacccagacttgcttccgtagtggagacttgcttttcagaacatagggatgaagtaaggtgcctgaaaagtttgggggaaaagtttctttcagagagttaagttattttatatatataatatatatataaaatatataatatacaatataaatatatagtgtgtgtgtatgcgtgtgtgtagacacacacgcatacacacatataatggaagcaataagccattctaagagcttgtatggttatggaggtctgactaggcatgatttcacgaaggcaagattggcatatcattgtaactaaaaaagctgacattgacccagacatattgtactctttctaaaaataataataataatgctaacagaaagaagagaaccgttcgtttgcaatctacagctagtagagactttgaggaagaattcaacagtgtgtcttcagcagtgttcagagccaagcaagaagttgaagttgcctagaccagaggacataagtatcatgtctcctttaactagcataccccgaagtggagaagggtgcagcaggctcaaaggcataagtcattccaatcagccaactaagttgtccttttctggtttcgtgttcaccatggaacattttgattatagttaatccttctatcttgaatcttctagagagttgctgaccaactgacgtatgtttccctttgtgaattaataaactggtgttctggttcat

SEQ ID NO: 10 - DNA, 3278 bp, Homo sapiens
aggcacacaggcaaaatcaagttctacatctgtccctgtgtatgtcacttgtttgaatacgaaataaaattaaaaaaataaattcagtgtattgagaaagcaagcaattctctcaaggtatatttctgacatactaagattttaacgactttcacaaatatgctgtactgagagagaatgttacataacattgagaactagtacaagtaaatattaaagtgaagtgaccatttcctacacaagctcattcagaggaggatgaagaccattttggaggaagaaaagcacccttattaagaattgcagcaagtaagccaacaaggtcttttcaggatgattttcttatatcaagtggtacatttcattttatttacttcagtttctggtgaatgtgtgactcagttgttgaaggacacctgctttgaaggaggggacattactacggtcttcacaccaagcgccaagtactgccaggtagtctgcacttaccacccaagatgtttactcttcactttcacggcggaatcaccatctgaggatcccacccgatggtttacttgtgtcctgaaagacagtgttacagaaacactgccaagagtgaataggacagcagcgatttctgggtattctttcaagcaatgctcacaccaaataagcgcttgcaacaaagacatttatgtggacctagacatgaagggcataaactataacagctcagttgccaagagtgctcaagaatgccaagaaagatgcacggatgacgtccactgccactttttcacgtacgccacaaggcagtttcccagcctggagcatcgtaacatttgtctactgaagcacacccaaacagggacaccaaccagaataacgaagctcgataaagtggtgtctggattttcactgaaatcctgtgcactttctaatctggcttgtattagggacattttccctaatacggtgtttgcagacagcaacatcgacagtgtcatggctcccgatgcttttgtctgtggccgaatctgcactcatcatcccggttgcttgttttttaccttcttttcccaggaatggcccaaagaatctcaaagaaatctttgtctccttaaaacatctgagagtggattgcccagtacacgcattaaaaagagcaaagctctttctggtttcagtctacaaagctgcaggcacagcatcccagtgttctgccattcttcattttaccatgacactgatttcttgggagaagaactggatattgttgctgcaaaaagtcacgaggcctgccagaaactgtgcaccaatgccgtccgctgccagttttttacctataccccagcccaagcatcctgcaacgaagggaagggcaagtgttacttaaagctttcttcaaacggatctccaactaaaatacttcacgggagaggaggcatctctggatacacattaaggttgtgtaaaatggataatgagtgtaccaccaaaatcaagcccaggatcgttggaggaactgcgtctgttcgtggtgagtggccgtggcaggtgaccctgcacacaacctcacccactcagagacacctgtgtggaggctccatcattggaaaccagtggatattaacagccgctcactgtttctatggggtagagtcacctaagattttgcgtgtctacagtggcattttaaatcaatctgaaataaaagaggacacatctttctttggggttcaagaaataataatccatgatcagtataaaatggcagaaagcgggtatgatattgccttgttgaaactggaaaccacagtgaattacacagattctcaacgacccatatgcctgccttccaaaggagatagaaatgtaatatacactgattgctgggtgactggatgggggtacagaaaactaagagacaaaatacaaaatactctccagaaagccaagatacccttagtgaccaacgaagagtgccagaagagatacagaggacataaaataacccataagatgatctgtgccggctacagggaaggagggaaggacgcttgcaagggagattcgggaggccctctgtcctgcaaacacaatgaggtctggcatctggtaggcatcacgagctggggcgaaggctgtgctcaaagggagcggccaggtgtttacaccaacgtggtcgagtacgtggactggattctggagaaaactcaagcagtgtgaatgggttcccaggggccattggagtccctgaaggacccaggatttgctgggagagggtgttgagttcactgtgccagcatgcttcctccacagtaacacgctgaaggggcttggtgtttgtaagaaaatgctagaagaaaacaaactgtcacaagttgttatgtccaaaactcccgttctatgatcgttgtagtttgtttgagcattcagtctctttgtttttgatcacgcttctatggagtccaagaattaccataaggcaatatttctgaagattactatataggcagatatagcagaaaataaccaagtagtggcagtggggatcaggcagaagaactggtaaaagaagccaccataaatagatttgttcgatgaaagatgaaaactggaagaaaggagaacaaagacagtcttcaccattttgcaggaatctacactctgcctatgtgaacacatttcttttgtaaagaaagaaattgattgcatttaatggcagattttcagaatagtcaggaattcttgtcatttccattttaaaatatatattaaaaaaaatcagttcgagtagacacgagctaagagtgaatgtgaagataacagaatttctgtgtggaagaggattacaagcagcaatttacctggaagtgataccttaggggcaatcttgaagatacactttcctgaaaaatgatttgtgatggattgtatatttatttaaaatatcttgggaggggaggctgatggagatagggagcatgctcaaacctccctaagacaagctgctgctgtgactatgggctcccaaagagctagatcgtatatttatttgacaaaaatcaccatagactgcatccatactacagagaaaaaacaattagggcgcaaatggatagttacagtaaagtcttcagcaagcagctgcctgtattctaagcactgggattttctgtttcgtgcaaatatttatctcattattgttgtgatctagttcaataacctagaatttgaattgtcaccacatagctttcaatctgtgccaacaactatacaattcatcaagtgtg

SEQ ID NO: 11 - DNA, 3655 bp, Homo sapiens
agcaatcctttctttcagctggagtgctcctcaggagccagccccacccttagaaaagatgttttccatgaggatcgtctgcctggtcctaagtgtggtgggcacagcatggactgcagatagtggtgaaggtgactttctagctgaaggaggaggcgtgcgtggcccaagggttgtggaaagacatcaatctgcctgcaaagattcagactggcccttctgctctgatgaagactggaactacaaatgcccttctggctgcaggatgaaagggttgattgatgaagtcaatcaagattttacaaacagaataaataagctcaaaaattcactatttgaatatcagaagaacaataaggattctcattcgttgaccactaatataatggaaattttgagaggcgatttttcctcagccaataaccgtgataatacctacaaccgagtgtcagaggatctgagaagcagaattgaagtcctgaagcgcaaagtcatagaaaaagtacagcatatccagcttctgcagaaaaatgttagagctcagttggttgatatgaaacgactggaggtggacattgatattaagatccgatcttgtcgagggtcatgcagtagggctttagctcgtgaagtagatctgaaggactatgaagatcagcagaagcaacttgaacaggtcattgccaaagacttacttccctctagagataggcaacacttaccactgataaaaatgaaaccagttccagacttggttcccggaaattttaagagccagcttcagaaggtacccccagagtggaaggcattaacagacatgccgcagatgagaatggagttagagagacctggtggaaatgagattactcgaggaggctccacctcttatggaaccggatcagagacggaaagccccaggaaccctagcagtgctggaagctggaactctgggagctctggacctggaagtactggaaaccgaaaccctgggagctctgggactggagggactgcaacctggaaacctgggagctctggacctggaagtactggaagctggaactctgggagctctggaactggaagtactggaaaccaaaaccctgggagccctagacctggtagtaccggaacctggaatcctggcagctctgaacgcggaagtgctgggcactggacctctgagagctctgtatctggtagtactggacaatggcactctgaatctggaagttttaggccagatagcccaggctctgggaacgcgaggcctaacaacccagactggggcacatttgaagaggtgtcaggaaatgtaagtccagggacaaggagagagtaccacacagaaaaactggtcacttctaaaggagataaagagctcaggactggtaaagagaaggtcacctctggtagcacaaccaccacgcgtcgttcatgctctaaaaccgttactaagactgttattggtcctgatggtcacaaagaagttaccaaagaagtggtgacctccgaagatggttctgactgtcccgaggcaatggatttaggcacattgtctggcataggtactctggatgggttccgccataggcaccctgatgaagctgccttcttcgacactgcctcaactggaaaaacattcccaggtttcttctcacctatgttaggagagtttgtcagtgagactgagtctaggggctcagaatctggcatcttcacaaatacaaaggaatccagttctcatcaccctgggatagctgaattcccttcccgtggtaaatcttcaagttacagcaaacaatttactagtagcacgagttacaacagaggagactccacatttgaaagcaagagctataaaatggcagatgaggccggaagtgaagccgatcatgaaggaacacatagcaccaagagaggccatgctaaatctcgccctgtcagagactgtgatgatgtcctccaaacacatccttcaggtacccaaagtggcattttcaatatcaagctaccgggatccagtaagattttttctgtttattgcgatcaagagaccagtttgggaggatggcttttgatccagcaaagaatggatggatcactgaattttaaccggacctggcaagactacaagagaggtttcggcagcctgaatgacgagggggaaggagaattctggctaggcaatgactacctccacttactaacccaaaggggctctgttcttagggttgaattagaggactgggctgggaatgaagcttatgcagaatatcacttccgggtaggctctgaggctgaaggctatgccctccaagtctcctcctatgaaggcactgcgggtgatgctctgattgagggttccgtagaggaaggggcagagtacacctctcacaacaacatgcagttcagcacctttgacagggatgcagaccagtgggaagagaactgtgcagaagtctatgggggaggctggtggtataataactgccaagcagccaatctcaatggaatctactaccctgggggctcctatgacccaaggaataacagtccttatgagattgagaatggagtggtctgggtttcctttagaggggcagattattccctcagggctgttcgcatgaaaattaggccccttgtgacccaataggctgaagaagtgggaatgggagcactctgtcttctttgctagagaagtggagagaaaatacaaaaggtaaagcagttgagattctctacaacctaaaaaattcctaggtgctattttcttatcctttgtactgtagctaaatgtacctgagacatattagtctttgaaaaataaagttatgtaaggttttttttatctttaaatagctctgtgggttttaacatttttataaagatataccaagggccattcagtacatcaggaaagtggcagacagaagcttctctctgcaaccttgaagactattggtttgagaacttctcttcccataccacccaaaatcataatgccattggaaagcaaaaagttgttttatccatttgatttgaattgttttaagccaatattttaaggtaaaactcactgaatctaaccatagctgacctttgtagtagaatttacaacttataattacaatgcacaatttataattacaatatgtatttatgtcttttgctatggagcaaatccaggaaggcaagagaaacattctttcctaaatataaatgaaaatctatcctttaaactcttccactagacgttgtaatgcacacttatttttttcccaaggagtaaccaatttctttctaaaacacatttaaaattttaaaactatttatgaatattaaaaaaagacataattcacacattaataaacaatctcccaagtattgatttaacttcatttttctaataatcataaactatattctgtgacatgctaattattattaaatgtaagtcgttagttcgaaagcctctcactaagtatgatctatgctatattcaaaattcaacccatttactttggtcaatatttgatctaagttgcatctttaatcctggtggtcttgccttctgatttttaatttgtatccttttctattaagatatatttgtcattttctcttgaatatgtattaaaatatcccaagc

SEQ ID NO: 12 - DNA, 2210 bp, Homo sapiens
agcaatcctttctttcagctggagtgctcctcaggagccagccccacccttagaaaagatgttttccatgaggatcgtctgcctggtcctaagtgtggtgggcacagcatggactgcagatagtggtgaaggtgactttctagctgaaggaggaggcgtgcgtggcccaagggttgtggaaagacatcaatctgcctgcaaagattcagactggcccttctgctctgatgaagactggaactacaaatgcccttctggctgcaggatgaaagggttgattgatgaagtcaatcaagattttacaaacagaataaataagctcaaaaattcactatttgaatatcagaagaacaataaggattctcattcgttgaccactaatataatggaaattttgagaggcgatttttcctcagccaataaccgtgataatacctacaaccgagtgtcagaggatctgagaagcagaattgaagtcctgaagcgcaaagtcatagaaaaagtacagcatatccagcttctgcagaaaaatgttagagctcagttggttgatatgaaacgactggaggtggacattgatattaagatccgatcttgtcgagggtcatgcagtagggctttagctcgtgaagtagatctgaaggactatgaagatcagcagaagcaacttgaacaggtcattgccaaagacttacttccctctagagataggcaacacttaccactgataaaaatgaaaccagttccagacttggttcccggaaattttaagagccagcttcagaaggtacccccagagtggaaggcattaacagacatgccgcagatgagaatggagttagagagacctggtggaaatgagattactcgaggaggctccacctcttatggaaccggatcagagacggaaagccccaggaaccctagcagtgctggaagctggaactctgggagctctggacctggaagtactggaaaccgaaaccctgggagctctgggactggagggactgcaacctggaaacctgggagctctggacctggaagtactggaagctggaactctgggagctctggaactggaagtactggaaaccaaaaccctgggagccctagacctggtagtaccggaacctggaatcctggcagctctgaacgcggaagtgctgggcactggacctctgagagctctgtatctggtagtactggacaatggcactctgaatctggaagttttaggccagatagcccaggctctgggaacgcgaggcctaacaacccagactggggcacatttgaagaggtgtcaggaaatgtaagtccagggacaaggagagagtaccacacagaaaaactggtcacttctaaaggagataaagagctcaggactggtaaagagaaggtcacctctggtagcacaaccaccacgcgtcgttcatgctctaaaaccgttactaagactgttattggtcctgatggtcacaaagaagttaccaaagaagtggtgacctccgaagatggttctgactgtcccgaggcaatggatttaggcacattgtctggcataggtactctggatgggttccgccataggcaccctgatgaagctgccttcttcgacactgcctcaactggaaaaacattcccaggtttcttctcacctatgttaggagagtttgtcagtgagactgagtctaggggctcagaatctggcatcttcacaaatacaaaggaatccagttctcatcaccctgggatagctgaattcccttcccgtggtaaatcttcaagttacagcaaacaatttactagtagcacgagttacaacagaggagactccacatttgaaagcaagagctataaaatggcagatgaggccggaagtgaagccgatcatgaaggaacacatagcaccaagagaggccatgctaaatctcgccctgtcagaggtatccacacttctcctttggggaagccttccctgtccccctagactaagttaaatatttctgcacagtgttcccatggccccttgcatttccttcttaactctctgttacacgtcattgaaactacacttttttggtctgtttttgtgctagactgtaagttccttgggggcagggcctttgtctgtctcatctctgtattcccaaatgcctaacagtacagagccatgactcaataaatacatgttaaatggatgaatg

SEQ ID NO: 13 - DNA, 3451 bp, Homo sapiens
agatatatataggattgaagatctctcagttaagtctacatgaaaaggatggtttcttggagcttccacaaacttaaaaccatgaaacatctattattgctactattgtgtgtttttctagttaagtcccaaggtgtcaacgacaatgaggagggtttcttcagtgcccgtggtcatcgaccccttgacaagaagagagaagaggctttgctacaacaggaaaggccaatcagaaatagtgttgatgagttaaataacaatgtggaagctgtttcccagacctcctcttcttcctttcagtacatgtatttgctgaaagacctgtggcaaaagaggcagaagcaagtaaaagataatgaaaatgtagtcaatgagtactcctcagaactggaaaagcaccaattatatatagatgagactgtgaatagcaatatcccaactaaccttcgtgtgcttcgttcaatcctggaaaacctgagaagcaaaatacaaaagttagaatctgatgtctcagctcaaatggaatattgtcgcaccccatgcactgtcagttgcaatattcctgtggtgtctggcaaagaatgtgaggaaattatcaggaaaggaggtgaaacatctgaaatgtatctcattcaacctgacagttctgtcaaaccgtatagagtatactgtgacatgaatacagaaaatggaggatggacagtgattcagaaccgtcaagacggtagtgttgactttggcaggaaatgggatccatataaacagggatttggaaatgttgcaaccaacacagatgggaagaattactgtggcctaccaggtgaatattggcttggaaatgataaaattagccagcttaccaggatgggacccacagaacttttgatagaaatggaggactggaaaggagacaaagtaaaggctcactatggaggattcactgtacagaatgaagccaacaaataccagatctcagtgaacaaatacagaggaacagccggtaatgccctcatggatggagcatctcagctgatgggagaaaacaggaccatgaccattcacaacggcatgttcttcagcacgtatgacagagacaatgacggctggttaacatcagatcccagaaaacagtgttctaaagaagacggtggtggatggtggtataatagatgtcatgcagccaatccaaacggcagatactactggggtggacagtacacctgggacatggcaaagcatggcacagatgatggtgtagtatggatgaattggaaggggtcatggtactcaatgaggaagatgagtatgaagatcaggcccttcttcccacagcaatagtccccaatacgtagatttttgctcttctgtatgtgacaacatttttgtacattatgttattggaattttctttcatacattatattcctctaaaactctcaagcagacgtgagtgtgactttttgaaaaaagtataggataaattacattaaaatagcacatgattttcttttgttttcttcatttctcttgctcaccaagaagtaacaaaagtatagttttgacagagttggtgttcataatttcagttctagttgattgcgagaattttcaaataaggaagaggggtcttttatccttgtcgtaggaaaaccatgacggaaaggaaaaactgatgtttaaaagtccacttttaaaactatatttatttatgtaggatctgtcaaagaaaacttccaaaaagatttattaattaaaccagactctgttgcaataagttaatgttttcttgttttgtaatccacacattcaatgagttaggctttgcacttgtaaggaaggagaagcgttcacaacctcaaatagctaataaaccggtcttgaatatttgaagatttaaaatctgactctaggacgggcacggtggctcacgactataatcccaacactttgggaggctgaggcgggcggtcacaaggtcaggagttcaagaccagcctgaccaatatggtgaaaccccatctctactaaaaatacaaaaattagccaggcgtggtggcaggtgcctgtagtcccagctacctgtgaggtggagattgcattgagccaagatctcaacactgcactccagcctgggcaacagcgtgagactccacctcaaaaaaaaaaaaaaaagaatctgactatataccatggaaaagccaccactctgccacttaaataaacatcaggatcagagattccaagaggacaatctgcatcaagtcttcaccaagtgttttttaagcgaaataatgaaatagggagcagaatatgcctgttgcccatagaaacgaggtctattcttgtcctcaattaggcttttttttcttcatagttacaccagaactaaagtaaaagtggtttttctgttctttctacttctccccatgaaatgggcatatcatctcaacacttcactccaagtcgccacgggcaaccttatgaccctaggtcctccacccctaatgtatcatcattgccacccatttttatggtacttattgttcttaagcttatcctcttaatcttttcatgtaagcaaagctcattaatttctgtcttggaaatgctactactctctttaattactcaccaaatccaactttaacttttgacctggtttctctgccacaagttctgtcccactggagcccatactcacctaccgctttgccatcacatttaacagaaaactcttatcaacttacttcctgcttaacattagctccttcctatctatatccaaatttcttaaattcaaattttttagctggagtaaaaatggtcccagtaccatttcctgttcccttcactataacctacatttttgtcacattaagtttttccccattccaggacaggtcaggccctttaaaaatttcaacagctttattgagatataattgatataatttaaaaaatcctgcacatgtgtcatgctggagccctattgattccaacagggatggcgccttgtccaagaagagacccagagccagtgaatgggacatagggtttatttaggacttaaatacagatgtggtccagtggcagtgggctggacaggaccgctactatttgtaaagagtatgtagtttatataacatttctacttagcactctccacttagcaacctccatttaacccaaaataaaaggccttggttccttgcacatcctgagttccaacggacaggcagggagttcaagtgtccttcacagataagaagtgaatctctctgggttggccattcccggattccttagcttagactctgaacacatattcttcttagaccatacagtcattctcagggtatgcttgagttaatgctgtcggatgcatctgtcatacaaagtgtttaacatatacgatttcatgattttggaaatatgcatacacccatgatat

SEQ ID NO: 14 - DNA, 3628 bp, Homo sapiens
agatatatataggattgaagatctctcagttaagtctacatgaaaaggatggtttcttggagcttccacaaacttaaaaccatgaaacatctattattgctactattgtgtgtttttctagttaagtcccaaggtgtcaacgacaatgaggagggtttcttcagtgcccgtggtcatcgaccccttgacaagaagagagaagaggctcccagcctgaggcctgccccaccgcccatcagtggaggtggctatcgggctcgtccagccaaagcagctgccactcaaaagaaagtagaaagaaaagcccctgatgctggaggctgtcttcacgctgacccagacctgggggtgttgtgtcctacaggatgtcagttgcaagaggctttgctacaacaggaaaggccaatcagaaatagtgttgatgagttaaataacaatgtggaagctgtttcccagacctcctcttcttcctttcagtacatgtatttgctgaaagacctgtggcaaaagaggcagaagcaagtaaaagataatgaaaatgtagtcaatgagtactcctcagaactggaaaagcaccaattatatatagatgagactgtgaatagcaatatcccaactaaccttcgtgtgcttcgttcaatcctggaaaacctgagaagcaaaatacaaaagttagaatctgatgtctcagctcaaatggaatattgtcgcaccccatgcactgtcagttgcaatattcctgtggtgtctggcaaagaatgtgaggaaattatcaggaaaggaggtgaaacatctgaaatgtatctcattcaacctgacagttctgtcaaaccgtatagagtatactgtgacatgaatacagaaaatggaggatggacagtgattcagaaccgtcaagacggtagtgttgactttggcaggaaatgggatccatataaacagggatttggaaatgttgcaaccaacacagatgggaagaattactgtggcctaccaggtgaatattggcttggaaatgataaaattagccagcttaccaggatgggacccacagaacttttgatagaaatggaggactggaaaggagacaaagtaaaggctcactatggaggattcactgtacagaatgaagccaacaaataccagatctcagtgaacaaatacagaggaacagccggtaatgccctcatggatggagcatctcagctgatgggagaaaacaggaccatgaccattcacaacggcatgttcttcagcacgtatgacagagacaatgacggctggttaacatcagatcccagaaaacagtgttctaaagaagacggtggtggatggtggtataatagatgtcatgcagccaatccaaacggcagatactactggggtggacagtacacctgggacatggcaaagcatggcacagatgatggtgtagtatggatgaattggaaggggtcatggtactcaatgaggaagatgagtatgaagatcaggcccttcttcccacagcaatagtccccaatacgtagatttttgctcttctgtatgtgacaacatttttgtacattatgttattggaattttctttcatacattatattcctctaaaactctcaagcagacgtgagtgtgactttttgaaaaaagtataggataaattacattaaaatagcacatgattttcttttgttttcttcatttctcttgctcaccaagaagtaacaaaagtatagttttgacagagttggtgttcataatttcagttctagttgattgcgagaattttcaaataaggaagaggggtcttttatccttgtcgtaggaaaaccatgacggaaaggaaaaactgatgtttaaaagtccacttttaaaactatatttatttatgtaggatctgtcaaagaaaacttccaaaaagatttattaattaaaccagactctgttgcaataagttaatgttttcttgttttgtaatccacacattcaatgagttaggctttgcacttgtaaggaaggagaagcgttcacaacctcaaatagctaataaaccggtcttgaatatttgaagatttaaaatctgactctaggacgggcacggtggctcacgactataatcccaacactttgggaggctgaggcgggcggtcacaaggtcaggagttcaagaccagcctgaccaatatggtgaaaccccatctctactaaaaatacaaaaattagccaggcgtggtggcaggtgcctgtagtcccagctacctgtgaggtggagattgcattgagccaagatctcaacactgcactccagcctgggcaacagcgtgagactccacctcaaaaaaaaaaaaaaaagaatctgactatataccatggaaaagccaccactctgccacttaaataaacatcaggatcagagattccaagaggacaatctgcatcaagtcttcaccaagtgttttttaagcgaaataatgaaatagggagcagaatatgcctgttgcccatagaaacgaggtctattcttgtcctcaattaggcttttttttcttcatagttacaccagaactaaagtaaaagtggtttttctgttctttctacttctccccatgaaatgggcatatcatctcaacacttcactccaagtcgccacgggcaaccttatgaccctaggtcctccacccctaatgtatcatcattgccacccatttttatggtacttattgttcttaagcttatcctcttaatcttttcatgtaagcaaagctcattaatttctgtcttggaaatgctactactctctttaattactcaccaaatccaactttaacttttgacctggtttctctgccacaagttctgtcccactggagcccatactcacctaccgctttgccatcacatttaacagaaaactcttatcaacttacttcctgcttaacattagctccttcctatctatatccaaatttcttaaattcaaattttttagctggagtaaaaatggtcccagtaccatttcctgttcccttcactataacctacatttttgtcacattaagtttttccccattccaggacaggtcaggccctttaaaaatttcaacagctttattgagatataattgatataatttaaaaaatcctgcacatgtgtcatgctggagccctattgattccaacagggatggcgccttgtccaagaagagacccagagccagtgaatgggacatagggtttatttaggacttaaatacagatgtggtccagtggcagtgggctggacaggaccgctactatttgtaaagagtatgtagtttatataacatttctacttagcactctccacttagcaacctccatttaacccaaaataaaaggccttggttccttgcacatcctgagttccaacggacaggcagggagttcaagtgtccttcacagataagaagtgaatctctctgggttggccattcccggattccttagcttagactctgaacacatattcttcttagaccatacagtcattctcagggtatgcttgagttaatgctgtcggatgcatctgtcatacaaagtgtttaacatatacgatttcatgattttggaaatatgcatacacccatgatat

SEQ ID NO: 15 - DNA, 1763 bp, Homo sapiens
cttctggtaaggaggccccgtgatcagctccagccatttgcagtcctggctatcccaggagcttacataaagggacaattggagcctgagaggtgacagtgctgacactacaaggctcggagctccgggcactcagacatcatgagttggtccttgcacccccggaatttaattctctacttctatgctcttttatttctctcttcaacatgtgtagcatatgttgctaccagagacaactgctgcatcttagatgaaagattcggtagttattgtccaactacctgtggcattgcagatttcctgtctacttatcaaaccaaagtagacaaggatctacagtctttggaagacatcttacatcaagttgaaaacaaaacatcagaagtcaaacagctgataaaagcaatccaactcacttataatcctgatgaatcatcaaaaccaaatatgatagacgctgctactttgaagtccaggaaaatgttagaagaaattatgaaatatgaagcatcgattttaacacatgactcaagtattcgatatttgcaggaaatatataattcaaataatcaaaagattgttaacctgaaagagaaggtagcccagcttgaagcacagtgccaggaaccttgcaaagacacggtgcaaatccatgatatcactgggaaagattgtcaagacattgccaataagggagctaaacagagcgggctttactttattaaacctctgaaagctaaccagcaattcttagtctactgtgaaatcgatgggtctggaaatggatggactgtgtttcagaagagacttgatggcagtgtagatttcaagaaaaactggattcaatataaagaaggatttggacatctgtctcctactggcacaacagaattttggctgggaaatgagaagattcatttgataagcacacagtctgccatcccatatgcattaagagtggaactggaagactggaatggcagaaccagtactgcagactatgccatgttcaaggtgggacctgaagctgacaagtaccgcctaacatatgcctacttcgctggtggggatgctggagatgcctttgatggctttgattttggcgatgatcctagtgacaagtttttcacatcccataatggcatgcagttcagtacctgggacaatgacaatgataagtttgaaggcaactgtgctgaacaggatggatctggttggtggatgaacaagtgtcacgctggccatctcaatggagtttattaccaaggtggcacttactcaaaagcatctactcctaatggttatgataatggcattatttgggccacttggaaaacccggtggtattccatgaagaaaaccactatgaagataatcccattcaacagactcacaattggagaaggacagcaacaccacctggggggagccaaacaggtcagaccagagcaccctgcggaaacagaatatgactcactttaccctgaggatgatttgtagaaaattaactgctaacttctattgacccacaaagtttcagaaattctctgaaagtttcttccttttttctcttactatatttattgatttcaagtcttctattaaggacatttagccttcaatggaaattaaaactcatttaggactgtatttccaaattactgatatcagagttatttaaaaattgtttatttgaggagataacatttcaactttgttcctaaatatataataataaaatgattgactttatttgcaaa

SEQ ID NO: 16 - DNA, 1114 bp, Homo sapiens
aacggaaacctttttagggagtccaaggtacagtcgccgcgtgcggagcttgttactggttacttggcctcatggcggtccgagcttcgttcgagaacaactgtgagatcggctgctttgccaagctcaccaacacctactgtctggtagcgatcggaggctcagagaacttctacagtgtgttcgagggcgagctctccgataccatccccgtggtgcacgcgtctatcgccggctgccgcatcatcgggcgcatgtgtgtggggaacaggcacggtctcctggtacccaacaataccaccgaccaggagctgcaacacattcgcaacagcctcccagacacagtgcagattaggcgggtggaggagcggctctcagccttgggcaatgtcaccacctgcaatgactacgtggccttggtccacccagacttggacagggagacagaagaaattctggcagatgtgctcaaggtggaagtcttcagacagacagtggccgaccaggtgctagtaggaagctactgtgtcttcagcaatcagggagggctggtgcatcccaagacttcaattgaagaccaggatgagctgtcctctcttcttcaagtcccccttgtggcggggactgtgaaccgaggcagtgaggtgattgctgctgggatggtggtgaatgactggtgtgccttctgtggcctggacacaaccagcacagagctgtcagtggtggagagtgtcttcaagctgaatgaagcccagcctagcaccattgccaccagcatgcgggattccctcattgacagcctcacctgagtcaccttccaagttgttccatgggctcctggctctggactgtggccaaccttctccacattccgcccaatctgtaccggatgctggcagggaggtggcagagagctcactgggactgaggggctgggcacccaacccttttccacctgtgcttatcgcctggatctatcattactgcaaaaacctgctctgttgtgctggctggcaggccctgtggctgctggctgagggttctgctgtcctgtgccaccccattaaagtgcagttccctccggaaaaaaaaaaaaaaaaaaaaaaaaaaaaaa

SEQ ID NO: 17 - DNA, 1057 bp, Homo sapiens
aacggaaacctttttagggagtccaaggtacagtcgccgcgtgcggagcttgttactggttacttggcctcatggcggtccgagcttcgttcgagaacaactgtgagatcggctgctttgccaagctcaccaacacctactgtctggtagcgatcggaggctcagagaacttctacaggtgcggcgggagccccggggcttacggtggcggggaggcgtgcgcaggagtcaagagctccggcagtgggagggtgccggcccctctgccccgccaccaccgagtccatgtccctacagtgtgttcgagggcgagctctccgataccatccccgtggtgcacgcgtctatcgccggctgccgcatcatcgggcgcatgtgtgtgggagacagaagaaattctggcagatgtgctcaaggtggaagtcttcagacagacagtggccgaccaggtgctagtaggaagctactgtgtcttcagcaatcagggagggctggtgcatcccaagacttcaattgaagaccaggatgagctgtcctctcttcttcaagtcccccttgtggcggggactgtgaaccgaggcagtgaggtgattgctgctgggatggtggtgaatgactggtgtgccttctgtggcctggacacaaccagcacagagctgtcagtggtggagagtgtcttcaagctgaatgaagcccagcctagcaccattgccaccagcatgcgggattccctcattgacagcctcacctgagtcaccttccaagttgttccatgggctcctggctctggactgtggccaaccttctccacattccgcccaatctgtaccggatgctggcagggaggtggcagagagctcactgggactgaggggctgggcacccaacccttttccacctgtgcttatcgcctggatctatcattactgcaaaaacctgctctgttgtgctggctggcaggccctgtggctgctggctgagggttctgctgtcctgtgccaccccattaaagtgcagttccctccggaaaaaaaaaaaaaaaaaaaaaaaaaaaaaa

SEQ ID NO: 18 - DNA, 1259 bp, Homo sapiens
tgggagggtcagctccggtcctgggtcgggaggggtgggggccagaggattcagggccggaggttctggtgggggcccagtgggcgggacccgaggacggaggggccgggaggccgagaggggcggggtcgcggcggggcctgagggacggaggccgggatacttgggaaaggatccgccggccttgaactcccgcctccgccgcccctaggcctcatggcggtccgagcttcgttcgagaacaactgtgagatcggctgctttgccaagctcaccaacacctactgtctggtagcgatcggaggctcagagaacttctacagtgtgttcgagggcgagctctccgataccatccccgtggtgcacgcgtctatcgccggctgccgcatcatcgggcgcatgtgtgtggggaacaggcacggtctcctggtacccaacaataccaccgaccaggagctgcaacacattcgcaacagcctcccagacacagtgcagattaggcgggtggaggagcggctctcagccttgggcaatgtcaccacctgcaatgactacgtggccttggtccacccagacttggacagggagacagaagaaattctggcagatgtgctcaaggtggaagtcttcagacagacagtggccgaccaggtgctagtaggaagctactgtgtcttcagcaatcagggagggctggtgcatcccaagacttcaattgaagaccaggatgagctgtcctctcttcttcaagtcccccttgtggcggggactgtgaaccgaggcagtgaggtgattgctgctgggatggtggtgaatgactggtgtgccttctgtggcctggacacaaccagcacagagctgtcagtggtggagagtgtcttcaagctgaatgaagcccagcctagcaccattgccaccagcatgcgggattccctcattgacagcctcacctgagtcaccttccaagttgttccatgggctcctggctctggactgtggccaaccttctccacattccgcccaatctgtaccggatgctggcagggaggtggcagagagctcactgggactgaggggctgggcacccaacccttttccacctgtgcttatcgcctggatctatcattactgcaaaaacctgctctgttgtgctggctggcaggccctgtggctgctggctgagggttctgctgtcctgtgccaccccattaaagtgcagttccctccggaaaaaaaaaaaaaaaaaaaaaaaaaaaaaa

SEQ ID NO: 19 - DNA, 2252 bp, Homo sapiens
agaacagcttgaagaccgttcatttttaagtgacaagagactcacctccaagaagcaattgtgttttcagaatgattttattcaagcaagcaacttatttcatttccttgtttgctacagtttcctgtggatgtctgactcaactctatgaaaacgccttcttcagaggtggggatgtagcttccatgtacaccccaaatgcccaatactgccagatgaggtgcacattccacccaaggtgtttgctattcagttttcttccagcaagttcaatcaatgacatggagaaaaggtttggttgcttcttgaaagatagtgttacaggaaccctgccaaaagtacatcgaacaggtgcagtttctggacattccttgaagcaatgtggtcatcaaataagtgcttgccatcgagacatttataaaggagttgatatgagaggagtcaattttaatgtgtctaaggttagcagtgttgaagaatgccaaaaaaggtgcaccagtaacattcgctgccagtttttttcatatgccacgcaaacatttcacaaggcagagtaccggaacaattgcctattaaagtacagtcccggaggaacacctaccgctataaaggtgctgagtaacgtggaatctggattctcactgaagccctgtgccctttcagaaattggttgccacatgaacatcttccagcatcttgcgttctcagatgtggatgttgccagggttctcactccagatgcttttgtgtgtcggaccatctgcacctatcaccccaactgcctcttctttacattctatacaaatgtatggaaaatcgagtcacaaagaaatgtttgtcttcttaaaacatctgaaagtggcacaccaagttcctctactcctcaagaaaacaccatatctggatatagccttttaacctgcaaaagaactttacctgaaccctgccattctaaaatttacccgggagttgactttggaggagaagaattgaatgtgacttttgttaaaggagtgaatgtttgccaagagacttgcacaaagatgattcgctgtcagtttttcacttattctttactcccagaagactgtaaggaagagaagtgtaagtgtttcttaagattatctatggatggttctccaactaggattgcgtatgggacacaagggagctctggttactctttgagattgtgtaacactggggacaactctgtctgcacaacaaaaacaagcacacgcattgttggaggaacaaactcttcttggggagagtggccctggcaggtgagcctgcaggtgaagctgacagctcagaggcacctgtgtggagggtcactcataggacaccagtgggtcctcactgctgcccactgctttgatgggcttcccctgcaggatgtttggcgcatctatagtggcattttaaatctgtcagacattacaaaagatacacctttctcacaaataaaagagattattattcaccaaaactataaagtctcagaagggaatcatgatatcgccttgataaaactccaggctcctttgaattacactgaattccaaaaaccaatatgcctaccttccaaaggtgacacaagcacaatttataccaactgttgggtaaccggatggggcttctcgaaggagaaaggtgaaatccaaaatattctacaaaaggtaaatattcctttggtaacaaatgaagaatgccagaaaagatatcaagattataaaataacccaacggatggtctgtgctggctataaagaagggggaaaagatgcttgtaagggagattcaggtggtcccttagtttgcaaacacaatggaatgtggcgtttggtgggcatcaccagctggggtgaaggctgtgcccgcagggagcaacctggtgtctacaccaaagtcgctgagtacatggactggattttagagaaaacacagagcagtgatggaaaagctcagatgcagtcaccagcatgagaagcagtccagagtctaggcaatttttacaacctgagttcaagtcaaattctgagcctggggggtcctcatctgcaaagcatggagagtggcatcttctttgcatcctaaggacgaaaaacacagtgcactcagagctgctgaggacaatgtctggctgaagcccgctttcagcacgccgtaaccaggggctgacaatgcgaggtcgcaactgagatctccatgactgtgtgttgtgaaataaaatggtgaaagatcaaaaaa

SEQ ID NO: 20 - DNA, 5663 bp, Homo sapiens
attacaaagaaagccggactcttttcttataactgagctcagccaaggaaactcttgcacaaatgtacaatactgtttggaatatggaagacctggatttagaatatgccaagacagatataaattgtggcacagacttgatgttttatatagaaatggacccaccagcactgcctcctaaaccaccaaaacctactactgtagccaacaacggtatgaataacaatatgtccttacaagatgctgaatggtactggggagatatctcgagggaagaagtgaatgaaaaacttcgagatacagcagacgggacctttttggtacgagatgcgtctactaaaatgcatggtgattatactcttacactaaggaaagggggaaataacaaattaatcaaaatatttcatcgagatgggaaatatggcttctctgacccattaaccttcagttctgtggttgaattaataaaccactaccggaatgaatctctagctcagtataatcccaaattggatgtgaaattactttatccagtatccaaataccaacaggatcaagttgtcaaagaagataatattgaagctgtagggaaaaaattacatgaatataacactcagtttcaagaaaaaagtcgagaatatgatagattatatgaagaatatacccgcacatcccaggaaatccaaatgaaaaggacagctattgaagcatttaatgaaaccataaaaatatttgaagaacagtgccagacccaagagcggtacagcaaagaatacatagaaaagtttaaacgtgaaggcaatgagaaagaaatacaaaggattatgcataattatgataagttgaagtctcgaatcagtgaaattattgacagtagaagaagattggaagaagacttgaagaagcaggcagctgagtatcgagaaattgacaaacgtatgaacagcattaaaccagaccttatccagctgagaaagacgagagaccaatacttgatgtggttgactcaaaaaggtgttcggcaaaagaagttgaacgagtggttgggcaatgaaaacactgaagaccaatattcactggtggaagatgatgaagatttgccccatcatgatgagaagacatggaatgttggaagcagcaaccgaaacaaagctgaaaacctgttgcgagggaagcgagatggcacttttcttgtccgggagagcagtaaacagggctgctatgcctgctctgtagtggtggacggcgaagtaaagcattgtgtcataaacaaaacagcaactggctatggctttgccgagccctataacttgtacagctctctgaaagaactggtgctacattaccaacacacctcccttgtgcagcacaacgactccctcaatgtcacactagcctacccagtatatgcacagcagaggcgatgaagcgcttactctttgatccttctcctgaagttcagccaccctgaggcctctggaaagcaaagggctcctctccagtctgatctgtgaattgagctgcagaaacgaagccatctttctttggatgggactagagctttctttcacaaaaaagaagtaggggaagacatgcagcctaaggctgtatgatgaccacacgttcctaagctggagtgcttatcccttctttttctttttttctttggtttaatttaaagccacaaccacatacaacacaaagagaaaaagaaatgcaaaaatctctgcgtgcagggacaaagaggcctttaaccatggtgcttgttaatgctttctgaagctttaccagctgaaagttgggactctggagagcggaggagagagaggcagaagaaccctggcctgagaaggtttggtccagcctggtttagcctggatgttgctgtgcacggtggacccagacacatcgcactgtggattatttcattttgtaacaaatgaacgatatgtagcagaaaggcacgtccactcacaagggacgctttgggagaatgtcagttcatgtatgttcagaagaaattctgtcatagaaagtgccagaaagtgtttaacttgtcaaaaaacaaaaacccagcaacagaaaaatggagtttggaaaacaggacttaaaatgacattcagtatataaaatatgtacataatattggatgactaactatcaaatagatggatttgtatcaataccaaatagcttctgttttgttttgctgaaggctaaattcacagcgctatgcaattcttaattttcattaagttgttatttcagttttaaatgtaccttcagaataagcttccccaccccagtttttgttgcttgaaaatattgttgtcccggatttttgttaatattcatttttgttatccttttttaaaagtaaatgtacaggatgccagtaaaaaaaaaaaatggcttcagaattaaaactatgaaatattttacagtttttcttgtacagagtacttggctgttagcccaaggttaaaaagttcataacagattttttttggactgttttgttgggcagtgcctgataagcttcaaagctgctttattcaataaaaaaaagaaatgaaaaagatatatgaatatgacaaagtattgctgagtccaacaatgttgttttaagactcttaaaatacggtacctggcaatgtttatttcataaagaattgtgaacttcttgaatctagggagggggaatgtagtgaagggatgtatcaagtggggtggtgggagggggaggcaaggttatatgcactttctcatgatttacagagaagtgaataactgcaaagtgaagttgcttcttctacttcagtcttctctcactttgatttgctagttgttatcaattaatgacaattacaaacctactgtatctctaatacagtgtgactggtcaggtatttcagttcttaggaaggaagtgccaagtttgtttttgggttcctggaacagcgctcacctttgtttagaacactggtttaaagggataatcatctctgtcacattagactatccatcatgaccagcaaatactcattttaggaaaaaaaaaagcatgatctgaaaaatacttttggtggtatgttggttaccctcctagctttccatttggtttagaacataaagcaaatagacacagtcatactgtcactgctctggactgtgtggagctcgctaaagtcatggtcattgcaggaatccaagtggcagtccttctcattcattctaatcattgtatgtgcttcactacgggggggagaaggaaacgttagcatcatgtttcccatttagggcaggagtgagaggtctctcttcctgatttagatatgcaaaagctggtatgttcagtaggaactgtacatgtgttgggaggcataaagactaattagcaaccataatatggtcactaccctaatagactaaatgaaatcttgcaatttcaaattactctttctccatattagatttacccacagctatatttctgtttaagtactagggtgagggttttctgttactttgttttttaatgttgttccttttgaaagaatcagtcttgcagctgagtgaaaaatctgtggaatgtattatttgtcctctttacatgaaactactcatacttaagcaaaagtcagtcttatagcaagactgttagccctcaaacttgactctactgatctgaccatttccctctcatcgccagacaactgacgatttccctggttttagtctgcgtctctgctttaaagttattgtgatatccttctagatcatacacaagtctaacagttaattagttaacagtttttaaactaggtttgtgggtatttttttggtagcacatgtatgctattacatacaaatttttatttctaaaatataagatctgagattgaatattttcattaaaagctacagttttgtgaatctttgtgcttcaacattctttgcaagatgatacggtatttaggcatttgccttatttttgcatctcacaaacataagtgcaatagatcttttcattgaacagcaaagtaggattcatcattccatatgacttgagttacaccagacctgttctgcccaatgcctttttgattacagtgtagcttgcccaccgcatttgtcgttttagatactttgctagccggccactttggatttcatcagacagtcctaacaatattgtctgaacggctgaatatgaatagatacagcagaggcactcctgatatatgatttttatccatgcgtcagtttttcccacccagtgtagcatcctaaagataaagccagaagctaagctgcagtgaggctgtgattgggcgtagaagtgggagcattgggacctcacattacacacacgagagatcataaccatgtgaaaaggcaaaaagcatgtgtttgcaacatctgataacttcatggcctttgataaatgtatatatgtatatgtgcatggactgtgtttccagtacacctttcagccaaaacagatccacagtagttgttgagttcaagtacataaagtacataacaagcgaacgtctagtacaattcttacttatgtgtatgggatttttccctttgaggttgctttgttttgtcttacaaaggtgaaaattgtttgtaagtgaagtgagaagttcatatttctttggcttttttgtgtttttaaaagttactccttttagggagctggtctgatgacttgcttagcttggaaatccttgttttcagtgtgtcgagtcaaaatgtgtttatgtgagctgtcactgtggggaaccaattgctttgtcatatagctggttatgaactagtaacatgtttgggaagtcctactgatgttcctttggaagaaaaaatctgctggttttaacaactgtgcttttgctatgtatggtatccaagttagttgaaacgcagacactgagatctgtttgagtttagggtcatttttagaaaggggcagtttaaagcacaatgtctcacatgggacaaagttccaaaatgccaaattcttattttttaaaaagctagttctataaaatactggtattatgggtggggaggaaatagaattgagtcaattggaaagactatccaacttaacatgaaacttgtcaccatgagatagcattagctgcccaggatgctgctatatatatatatatatatatatatgtgtgtgtgtgtgtgtgtgtgtgtgtatatatatatatatatatatatatatatatatatatatatgtgtgtgtatatatatatatatgtgtatatatatatgtatatacatatatgtatatatatgcacatatatatatgtatttaaaaaaatcaaaacaaaaaaaaactcatttatacctgtgtattttttaaagctacaatctgttcaatgtttttaaaaatctgtttatatgacattgttaaaataaagttggtcttttgacgagagggaggatgtcacggtcagttgtaactttgccttcacaaggcaactggggtggggggtgggggtagtgtgcctccttgacatttcgttcaagttatagattcaatggagctatgtcttgttttaagttgctttaatgcattgtattagatcttcaaacagaataaaggttgttttgaaactgaaaaaaaaaaaaaaaaaa

SEQ ID NO: 21 - DNA, 6453 bp, Homo sapiens
tacaaccaggctcaactgttgcatggtagcagatttgcaaacatgagtgctgaggggtaccagtacagagcgctgtatgattataaaaaggaaagagaagaagatattgacttgcacttgggtgacatattgactgtgaataaagggtccttagtagctcttggattcagtgatggacaggaagccaggcctgaagaaattggctggttaaatggctataatgaaaccacaggggaaaggggggactttccgggaacttacgtagaatatattggaaggaaaaaaatctcgcctcccacaccaaagccccggccacctcggcctcttcctgttgcaccaggttcttcgaaaactgaagcagatgttgaacaacaagctttgactctcccggatcttgcagagcagtttgcccctcctgacattgccccgcctcttcttatcaagctcgtggaagccattgaaaagaaaggtctggaatgttcaactctatacagaacacagagctccagcaacctggcagaattacgacagcttcttgattgtgatacaccctccgtggacttggaaatgatcgatgtgcacgttttggctgacgctttcaaacgctatctcctggacttaccaaatcctgtcattccagcagccgtttacagtgaaatgatttctttagctccagaagtacaaagctccgaagaatatattcagctattgaagaagcttattaggtcgcctagcatacctcatcagtattggcttacgcttcagtatttgttaaaacatttcttcaagctctctcaaacctccagcaaaaatctgttgaatgcaagagtactctctgaaattttcagccctatgcttttcagattctcagcagccagctctgataatactgaaaacctcataaaagttatagaaattttaatctcaactgaatggaatgaacgacagcctgcaccagcactgcctcctaaaccaccaaaacctactactgtagccaacaacggtatgaataacaatatgtccttacaagatgctgaatggtactggggagatatctcgagggaagaagtgaatgaaaaacttcgagatacagcagacgggacctttttggtacgagatgcgtctactaaaatgcatggtgattatactcttacactaaggaaagggggaaataacaaattaatcaaaatatttcatcgagatgggaaatatggcttctctgacccattaaccttcagttctgtggttgaattaataaaccactaccggaatgaatctctagctcagtataatcccaaattggatgtgaaattactttatccagtatccaaataccaacaggatcaagttgtcaaagaagataatattgaagctgtagggaaaaaattacatgaatataacactcagtttcaagaaaaaagtcgagaatatgatagattatatgaagaatatacccgcacatcccaggaaatccaaatgaaaaggacagctattgaagcatttaatgaaaccataaaaatatttgaagaacagtgccagacccaagagcggtacagcaaagaatacatagaaaagtttaaacgtgaaggcaatgagaaagaaatacaaaggattatgcataattatgataagttgaagtctcgaatcagtgaaattattgacagtagaagaagattggaagaagacttgaagaagcaggcagctgagtatcgagaaattgacaaacgtatgaacagcattaaaccagaccttatccagctgagaaagacgagagaccaatacttgatgtggttgactcaaaaaggtgttcggcaaaagaagttgaacgagtggttgggcaatgaaaacactgaagaccaatattcactggtggaagatgatgaagatttgccccatcatgatgagaagacatggaatgttggaagcagcaaccgaaacaaagctgaaaacctgttgcgagggaagcgagatggcacttttcttgtccgggagagcagtaaacagggctgctatgcctgctctgtagtggtggacggcgaagtaaagcattgtgtcataaacaaaacagcaactggctatggctttgccgagccctataacttgtacagctctctgaaagaactggtgctacattaccaacacacctcccttgtgcagcacaacgactccctcaatgtcacactagcctacccagtatatgcacagcagaggcgatgaagcgcttactctttgatccttctcctgaagttcagccaccctgaggcctctggaaagcaaagggctcctctccagtctgatctgtgaattgagctgcagaaacgaagccatctttctttggatgggactagagctttctttcacaaaaaagaagtaggggaagacatgcagcctaaggctgtatgatgaccacacgttcctaagctggagtgcttatcccttctttttctttttttctttggtttaatttaaagccacaaccacatacaacacaaagagaaaaagaaatgcaaaaatctctgcgtgcagggacaaagaggcctttaaccatggtgcttgttaatgctttctgaagctttaccagctgaaagttgggactctggagagcggaggagagagaggcagaagaaccctggcctgagaaggtttggtccagcctggtttagcctggatgttgctgtgcacggtggacccagacacatcgcactgtggattatttcattttgtaacaaatgaacgatatgtagcagaaaggcacgtccactcacaagggacgctttgggagaatgtcagttcatgtatgttcagaagaaattctgtcatagaaagtgccagaaagtgtttaacttgtcaaaaaacaaaaacccagcaacagaaaaatggagtttggaaaacaggacttaaaatgacattcagtatataaaatatgtacataatattggatgactaactatcaaatagatggatttgtatcaataccaaatagcttctgttttgttttgctgaaggctaaattcacagcgctatgcaattcttaattttcattaagttgttatttcagttttaaatgtaccttcagaataagcttccccaccccagtttttgttgcttgaaaatattgttgtcccggatttttgttaatattcatttttgttatccttttttaaaagtaaatgtacaggatgccagtaaaaaaaaaaaatggcttcagaattaaaactatgaaatattttacagtttttcttgtacagagtacttggctgttagcccaaggttaaaaagttcataacagattttttttggactgttttgttgggcagtgcctgataagcttcaaagctgctttattcaataaaaaaaagaaatgaaaaagatatatgaatatgacaaagtattgctgagtccaacaatgttgttttaagactcttaaaatacggtacctggcaatgtttatttcataaagaattgtgaacttcttgaatctagggagggggaatgtagtgaagggatgtatcaagtggggtggtgggagggggaggcaaggttatatgcactttctcatgatttacagagaagtgaataactgcaaagtgaagttgcttcttctacttcagtcttctctcactttgatttgctagttgttatcaattaatgacaattacaaacctactgtatctctaatacagtgtgactggtcaggtatttcagttcttaggaaggaagtgccaagtttgtttttgggttcctggaacagcgctcacctttgtttagaacactggtttaaagggataatcatctctgtcacattagactatccatcatgaccagcaaatactcattttaggaaaaaaaaaagcatgatctgaaaaatacttttggtggtatgttggttaccctcctagctttccatttggtttagaacataaagcaaatagacacagtcatactgtcactgctctggactgtgtggagctcgctaaagtcatggtcattgcaggaatccaagtggcagtccttctcattcattctaatcattgtatgtgcttcactacgggggggagaaggaaacgttagcatcatgtttcccatttagggcaggagtgagaggtctctcttcctgatttagatatgcaaaagctggtatgttcagtaggaactgtacatgtgttgggaggcataaagactaattagcaaccataatatggtcactaccctaatagactaaatgaaatcttgcaatttcaaattactctttctccatattagatttacccacagctatatttctgtttaagtactagggtgagggttttctgttactttgttttttaatgttgttccttttgaaagaatcagtcttgcagctgagtgaaaaatctgtggaatgtattatttgtcctctttacatgaaactactcatacttaagcaaaagtcagtcttatagcaagactgttagccctcaaacttgactctactgatctgaccatttccctctcatcgccagacaactgacgatttccctggttttagtctgcgtctctgctttaaagttattgtgatatccttctagatcatacacaagtctaacagttaattagttaacagtttttaaactaggtttgtgggtatttttttggtagcacatgtatgctattacatacaaatttttatttctaaaatataagatctgagattgaatattttcattaaaagctacagttttgtgaatctttgtgcttcaacattctttgcaagatgatacggtatttaggcatttgccttatttttgcatctcacaaacataagtgcaatagatcttttcattgaacagcaaagtaggattcatcattccatatgacttgagttacaccagacctgttctgcccaatgcctttttgattacagtgtagcttgcccaccgcatttgtcgttttagatactttgctagccggccactttggatttcatcagacagtcctaacaatattgtctgaacggctgaatatgaatagatacagcagaggcactcctgatatatgatttttatccatgcgtcagtttttcccacccagtgtagcatcctaaagataaagccagaagctaagctgcagtgaggctgtgattgggcgtagaagtgggagcattgggacctcacattacacacacgagagatcataaccatgtgaaaaggcaaaaagcatgtgtttgcaacatctgataacttcatggcctttgataaatgtatatatgtatatgtgcatggactgtgtttccagtacacctttcagccaaaacagatccacagtagttgttgagttcaagtacataaagtacataacaagcgaacgtctagtacaattcttacttatgtgtatgggatttttccctttgaggttgctttgttttgtcttacaaaggtgaaaattgtttgtaagtgaagtgagaagttcatatttctttggcttttttgtgtttttaaaagttactccttttagggagctggtctgatgacttgcttagcttggaaatccttgttttcagtgtgtcgagtcaaaatgtgtttatgtgagctgtcactgtggggaaccaattgctttgtcatatagctggttatgaactagtaacatgtttgggaagtcctactgatgttcctttggaagaaaaaatctgctggttttaacaactgtgcttttgctatgtatggtatccaagttagttgaaacgcagacactgagatctgtttgagtttagggtcatttttagaaaggggcagtttaaagcacaatgtctcacatgggacaaagttccaaaatgccaaattcttattttttaaaaagctagttctataaaatactggtattatgggtggggaggaaatagaattgagtcaattggaaagactatccaacttaacatgaaacttgtcaccatgagatagcattagctgcccaggatgctgctatatatatatatatatatatatatgtgtgtgtgtgtgtgtgtgtgtgtgtatatatatatatatatatatatatatatatatatatatatgtgtgtgtatatatatatatatgtgtatatatatatgtatatacatatatgtatatatatgcacatatatatatgtatttaaaaaaatcaaaacaaaaaaaaactcatttatacctgtgtattttttaaagctacaatctgttcaatgtttttaaaaatctgtttatatgacattgttaaaataaagttggtcttttgacgagagggaggatgtcacggtcagttgtaactttgccttcacaaggcaactggggtggggggtgggggtagtgtgcctccttgacatttcgttcaagttatagattcaatggagctatgtcttgttttaagttgctttaatgcattgtattagatcttcaaacagaataaaggttgttttgaaactgaaaaaaaaaaaaaaaaaa

SEQ ID NO: 22 - DNA, 5823 bp, Homo sapiens
agcgaaatccagttggcttctcaatgaggagccggcagtgagcggcggtggcccggacgcactgccgggcggggcgtggggcggagggacgagccgagccgagccaagcggagctgggccactgtgcacgcccggagggtcctggcggcgcccccgctcctgcgcgcactctcggcgccggacacgagcactgcctgccgggaacaggctggggggaggtgcgggggcttggcccacttggtggaagaacagctttggggattttttttttttcattgtcggatacaggcatttcaaagggaaaccgttgaaatgcataacctgcaaacactgcctcctaaaccaccaaaacctactactgtagccaacaacggtatgaataacaatatgtccttacaagatgctgaatggtactggggagatatctcgagggaagaagtgaatgaaaaacttcgagatacagcagacgggacctttttggtacgagatgcgtctactaaaatgcatggtgattatactcttacactaaggaaagggggaaataacaaattaatcaaaatatttcatcgagatgggaaatatggcttctctgacccattaaccttcagttctgtggttgaattaataaaccactaccggaatgaatctctagctcagtataatcccaaattggatgtgaaattactttatccagtatccaaataccaacaggatcaagttgtcaaagaagataatattgaagctgtagggaaaaaattacatgaatataacactcagtttcaagaaaaaagtcgagaatatgatagattatatgaagaatatacccgcacatcccaggaaatccaaatgaaaaggacagctattgaagcatttaatgaaaccataaaaatatttgaagaacagtgccagacccaagagcggtacagcaaagaatacatagaaaagtttaaacgtgaaggcaatgagaaagaaatacaaaggattatgcataattatgataagttgaagtctcgaatcagtgaaattattgacagtagaagaagattggaagaagacttgaagaagcaggcagctgagtatcgagaaattgacaaacgtatgaacagcattaaaccagaccttatccagctgagaaagacgagagaccaatacttgatgtggttgactcaaaaaggtgttcggcaaaagaagttgaacgagtggttgggcaatgaaaacactgaagaccaatattcactggtggaagatgatgaagatttgccccatcatgatgagaagacatggaatgttggaagcagcaaccgaaacaaagctgaaaacctgttgcgagggaagcgagatggcacttttcttgtccgggagagcagtaaacagggctgctatgcctgctctgtagtggtggacggcgaagtaaagcattgtgtcataaacaaaacagcaactggctatggctttgccgagccctataacttgtacagctctctgaaagaactggtgctacattaccaacacacctcccttgtgcagcacaacgactccctcaatgtcacactagcctacccagtatatgcacagcagaggcgatgaagcgcttactctttgatccttctcctgaagttcagccaccctgaggcctctggaaagcaaagggctcctctccagtctgatctgtgaattgagctgcagaaacgaagccatctttctttggatgggactagagctttctttcacaaaaaagaagtaggggaagacatgcagcctaaggctgtatgatgaccacacgttcctaagctggagtgcttatcccttctttttctttttttctttggtttaatttaaagccacaaccacatacaacacaaagagaaaaagaaatgcaaaaatctctgcgtgcagggacaaagaggcctttaaccatggtgcttgttaatgctttctgaagctttaccagctgaaagttgggactctggagagcggaggagagagaggcagaagaaccctggcctgagaaggtttggtccagcctggtttagcctggatgttgctgtgcacggtggacccagacacatcgcactgtggattatttcattttgtaacaaatgaacgatatgtagcagaaaggcacgtccactcacaagggacgctttgggagaatgtcagttcatgtatgttcagaagaaattctgtcatagaaagtgccagaaagtgtttaacttgtcaaaaaacaaaaacccagcaacagaaaaatggagtttggaaaacaggacttaaaatgacattcagtatataaaatatgtacataatattggatgactaactatcaaatagatggatttgtatcaataccaaatagcttctgttttgttttgctgaaggctaaattcacagcgctatgcaattcttaattttcattaagttgttatttcagttttaaatgtaccttcagaataagcttccccaccccagtttttgttgcttgaaaatattgttgtcccggatttttgttaatattcatttttgttatccttttttaaaagtaaatgtacaggatgccagtaaaaaaaaaaaatggcttcagaattaaaactatgaaatattttacagtttttcttgtacagagtacttggctgttagcccaaggttaaaaagttcataacagattttttttggactgttttgttgggcagtgcctgataagcttcaaagctgctttattcaataaaaaaaagaaatgaaaaagatatatgaatatgacaaagtattgctgagtccaacaatgttgttttaagactcttaaaatacggtacctggcaatgtttatttcataaagaattgtgaacttcttgaatctagggagggggaatgtagtgaagggatgtatcaagtggggtggtgggagggggaggcaaggttatatgcactttctcatgatttacagagaagtgaataactgcaaagtgaagttgcttcttctacttcagtcttctctcactttgatttgctagttgttatcaattaatgacaattacaaacctactgtatctctaatacagtgtgactggtcaggtatttcagttcttaggaaggaagtgccaagtttgtttttgggttcctggaacagcgctcacctttgtttagaacactggtttaaagggataatcatctctgtcacattagactatccatcatgaccagcaaatactcattttaggaaaaaaaaaagcatgatctgaaaaatacttttggtggtatgttggttaccctcctagctttccatttggtttagaacataaagcaaatagacacagtcatactgtcactgctctggactgtgtggagctcgctaaagtcatggtcattgcaggaatccaagtggcagtccttctcattcattctaatcattgtatgtgcttcactacgggggggagaaggaaacgttagcatcatgtttcccatttagggcaggagtgagaggtctctcttcctgatttagatatgcaaaagctggtatgttcagtaggaactgtacatgtgttgggaggcataaagactaattagcaaccataatatggtcactaccctaatagactaaatgaaatcttgcaatttcaaattactctttctccatattagatttacccacagctatatttctgtttaagtactagggtgagggttttctgttactttgttttttaatgttgttccttttgaaagaatcagtcttgcagctgagtgaaaaatctgtggaatgtattatttgtcctctttacatgaaactactcatacttaagcaaaagtcagtcttatagcaagactgttagccctcaaacttgactctactgatctgaccatttccctctcatcgccagacaactgacgatttccctggttttagtctgcgtctctgctttaaagttattgtgatatccttctagatcatacacaagtctaacagttaattagttaacagtttttaaactaggtttgtgggtatttttttggtagcacatgtatgctattacatacaaatttttatttctaaaatataagatctgagattgaatattttcattaaaagctacagttttgtgaatctttgtgcttcaacattctttgcaagatgatacggtatttaggcatttgccttatttttgcatctcacaaacataagtgcaatagatcttttcattgaacagcaaagtaggattcatcattccatatgacttgagttacaccagacctgttctgcccaatgcctttttgattacagtgtagcttgcccaccgcatttgtcgttttagatactttgctagccggccactttggatttcatcagacagtcctaacaatattgtctgaacggctgaatatgaatagatacagcagaggcactcctgatatatgatttttatccatgcgtcagtttttcccacccagtgtagcatcctaaagataaagccagaagctaagctgcagtgaggctgtgattgggcgtagaagtgggagcattgggacctcacattacacacacgagagatcataaccatgtgaaaaggcaaaaagcatgtgtttgcaacatctgataacttcatggcctttgataaatgtatatatgtatatgtgcatggactgtgtttccagtacacctttcagccaaaacagatccacagtagttgttgagttcaagtacataaagtacataacaagcgaacgtctagtacaattcttacttatgtgtatgggatttttccctttgaggttgctttgttttgtcttacaaaggtgaaaattgtttgtaagtgaagtgagaagttcatatttctttggcttttttgtgtttttaaaagttactccttttagggagctggtctgatgacttgcttagcttggaaatccttgttttcagtgtgtcgagtcaaaatgtgtttatgtgagctgtcactgtggggaaccaattgctttgtcatatagctggttatgaactagtaacatgtttgggaagtcctactgatgttcctttggaagaaaaaatctgctggttttaacaactgtgcttttgctatgtatggtatccaagttagttgaaacgcagacactgagatctgtttgagtttagggtcatttttagaaaggggcagtttaaagcacaatgtctcacatgggacaaagttccaaaatgccaaattcttattttttaaaaagctagttctataaaatactggtattatgggtggggaggaaatagaattgagtcaattggaaagactatccaacttaacatgaaacttgtcaccatgagatagcattagctgcccaggatgctgctatatatatatatatatatatatatgtgtgtgtgtgtgtgtgtgtgtgtgtatatatatatatatatatatatatatatatatatatatatgtgtgtgtatatatatatatatgtgtatatatatatgtatatacatatatgtatatatatgcacatatatatatgtatttaaaaaaatcaaaacaaaaaaaaactcatttatacctgtgtattttttaaagctacaatctgttcaatgtttttaaaaatctgtttatatgacattgttaaaataaagttggtcttttgacgagagggaggatgtcacggtcagttgtaactttgccttcacaaggcaactggggtggggggtgggggtagtgtgcctccttgacatttcgttcaagttatagattcaatggagctatgtcttgttttaagttgctttaatgcattgtattagatcttcaaacagaataaaggttgttttgaaactgaaaaaaaaaaaaaaaaaa

SEQ ID NO: 23 - DNA, 1797 bp, Homo sapiens
ggcgggtactgcgttagtgattagagtttcttccctgccggaggtgggatacacggtagcatcatggtcgaggaggtacagaaacattctgtacacacccttgtgttcaggtcgttgaagaggacccatgacatgtttgtagctgataatggaaaacctgtgcctttagatgaagagagtcacaaacgaaaaatggcaatcaagcttcgtaatgagtatggtcctgtgttgcatatgcctacttcaaaagaaaatcttaaagagaagggtcctcagaatgcaacggattcatatgttcataaacagtaccctgccaatcaaggacaagaagttgaatactttgtggcaggtacacatccatacccaccaggacctggggttgctttgacagcagatactaagatccagagaatgccaagtgaatcagctgcacagtccttagcggtggcattacctttgcagaccaaggctgatgcaaatcgtactgcccctagtggaagtgaataccgacatcctggggcttctgaccgtccacagcctacagcgatgaattcaattgtcatggagactggcaataccaagaactctgcactgatggctaaaaaagcccctacaatgccaaaaccccagtggcacccaccgtggaaactctacagggttatcagtgggcatcttggctgggttcgatgtattgctgtggaacctggaaatcagtggtttgttactggatctgctgacagaactataaagatctgggacttggctagtggcaaattaaaactgtcattgactgggcatattagtactgtgcggggcgtgatagtaagcacaaggagcccatatctgttctcttgtggagaagacaaacaagtgaaatgctgggatctcgaatacaataaggttatacggcattatcatggacatttaagtgcagtgtatggtttggatttgcacccgacaatcgatgtgttggtaacctgtagtcgagattcaactgcacggatttgggatgtgagaactaaagccagtgtacacacattatctggacatacaaatgcagttgctacagtgagatgtcaggctgcagaaccacaaattattacaggaagccatgatactacaattcgattatgggatctggtggctggaaaaacaagagtgacattaacaaatcacaaaaaatcagttagggctgtggttttacatccaagacattacacatttgcatctggttctccagataacataaagcagtggaaattccctgatggaagtttcattcaaaatctttccggtcataatgctattattaacacattgacggtaaattctgatggagtgcttgtatctggagctgacaatggcaccatgcatctttgggactggagaactggctacaattttcagagagttcacgcagctgtgcaacctgggtctttggacagtgaatcaggaatatttgcttgtgcttttgatcagtctgaaagtcgattactaacagctgaagctgataaaaccattaaagtatacagagaggatgacacagccacagaagaaactcatccagtcagctggaaaccagaaattatcaagagaaagagattttaatgaatgtggaattttttctctctctttttttttctttttaattaaaaaaaaaaaagcttggcgttcatgaggatatccagtcattttgtgctctggctgggaatataaaggagaaattcacttgcttcaatcattgctgcttcatattttacaataaactgtcccctgtcccctaaaaaaaaaaaaaaa

SEQ ID NO: 24 - DNA, 11794 bp, Homo sapiens
ccgatctggggggaatcagttgtttcttcaggtcttcgcaggattccagctcccccaactacctccgtcgccttctaaaactggcaggctctggacgttttgcatgctgaagaaaatcactgttttgcctccagcaaggaacataaatgttgcaacactgactcctcctctcatgaagaaagagtgaacaagtgcaccgagttgagcttcttctcacagagccaccgggctggggaccggggagcggaggctgaaatccccagacgccggttttctgggctgggctttctgccttactcactccttctccctctttctggattttaccgaccgttcgcgaaacagctttccacacaatggagcttcatgtcctcgtgcaggaagtactcatcgactgatgtggcagactttgctccctggcaaaactaaagaactctcctattcatggaggcgaacactgaggatgctttccacatgaaccctgaagtgaacttctgatacatttcctgcagcaagagaaggcagccaacatgaaggaaaatgtggcatctgcaaccgttttcactctgctactttttctcaacacctgccttctgaatggacagttacctcctggaaaacctgagatctttaaatgtcgttctcccaataaggaaacattcacctgctggtggaggcctgggacagatggaggacttcctaccaattattcactgacttaccacagggaaggagagacactcatgcatgaatgtccagactacataaccggtggccccaactcctgccactttggcaagcagtacacctccatgtggaggacatacatcatgatggtcaatgccactaaccagatgggaagcagtttctcggatgaactttatgtggacgtgacttacatagttcagccagaccctcctttggagctggctgtggaagtaaaacagccagaagacagaaaaccctacctgtggattaaatggtctccacctaccctgattgacttaaaaactggttggttcacgctcctgtatgaaattcgattaaaacccgagaaagcagctgagtgggagatccattttgctgggcagcaaacagagtttaagattctcagcctacatccaggacagaaataccttgtccaggttcgctgcaaaccagaccatggatactggagtgcatggagtccagcgaccttcattcagatacctagtgacttcaccatgaatgatacaaccgtgtggatctctgtggctgtcctttctgctgtcatctgtttgattattgtctgggcagtggctttgaagggctatagcatggtgacctgcatctttccgccagttcctgggccaaaaataaaaggatttgatgctcatctgttggagaagggcaagtctgaagaactactgagtgccttgggatgccaagactttcctcccacttctgactatgaggacttgctggtggagtatttagaagtagatgatagtgaggaccagcatctaatgtcagtccattcaaaagaacacccaagtcaaggtatgaaacccacatacctggatcctgacactgactcaggccgggggagctgtgacagcccttcccttttgtctgaaaagtgtgaggaaccccaggccaatccctccacattctatgatcctgaggtcattgagaagccagagaatcctgaaacaacccacacctgggacccccagtgcataagcatggaaggcaaaatcccctattttcatgctggtggatccaaatgttcaacatggcccttaccacagcccagccagcacaaccccagatcctcttaccacaatattactgatgtgtgtgagctggctgtgggccctgcaggtgcaccggccactctgttgaatgaagcaggtaaagatgctttaaaatcctctcaaaccattaagtctagagaagagggaaaggcaacccagcagagggaggtagaaagcttccattctgagactgaccaggatacgccctggctgctgccccaggagaaaaccccctttggctccgctaaacccttggattatgtggagattcacaaggtcaacaaagatggtgcattatcattgctaccaaaacagagagagaacagcggcaagcccaagaagcccgggactcctgagaacaataaggagtatgccaaggtgtccggggtcatggataacaacatcctggtgttggtgccagatccacatgctaaaaacgtggcttgctttgaagaatcagccaaagaggccccaccatcacttgaacagaatcaagctgagaaagccctggccaacttcactgcaacatcaagcaagtgcaggctccagctgggtggtttggattacctggatcccgcatgttttacacactcctttcactgatagcttgactaatggaatgattggttaaaatgtgatttttcttcaggtaacactacagagtacgtgaaatgctcaagaatgtagtcagactgacactactaaagctcccagctcctttcatgctccatttttaaccacttgcctctttctccagcagctgattccagaacaaatcattatgtttcctaactgtgatttgtagatttactttttgctgttagttataaaactatgtgttcaatgaaataaaagcacactgcttagtattcttgagggacaatgccaataggtatatcctctggaaaaggctttcatgatttggcatgggacagacggaaatgaaattgtcaaaattgtttaccatagaaagatgacaaaagaaaattttccacataggaaaatgccatgaaaattgcttttgaaaaacaactgcataacctttacactcctcgtccattttattaggattacccaaatataaccatttaaagaaagaatgcattccagaacaaattgtttacataagttcctataccttactgacacattgctgatatgcaagtaagaaataatgcctccaattttttcttaaaatagtttagatatgttaagcatggattttccccctaaattctactctaaagcttctataaaatatagtttggaaataaaaatgttcttacacaaggggcaaatgaatttcatgtgaatccctttaggatgttttcctccttcatttcagcatgatagataatttattatacaccttagtctttccttagttaaaaaaaaattccctaaagactaacttgaaaagaaaaccacagcaggatgctaatggaattactgccttactgtacatacaaattctactttaatataaacccataagtttaactgtatttttgaagactatttttctatgacttaggtaaaataaaagactattttctattttcccagtacagctgtttatgtattcagtgggtacagtattttctgctgcaaggttataatgtgtatttacagtacatagtagtatataaagttcccgtttgtggagtaaaatgccataccaacccaaagcccactgtgaaatatgaagtgaatgacaaaattcagttttcaacgcaatatagtatagtttatctgattcttttgatctccaggacactttaaacaactgctaccaccaccaccaacctagggatttaggattctccacagaccagaaattatttctcctttgagtttcaggctcctctgggactcctgttcatcaatgggtgaatcttcctaaagctaccataaaaagggagggcgacgatttctaacagctgtttaaaagagagaggttttgcttttgtgagaaatcttgggccacaaaaaaattttaagcaaagccaggagttagtgtctctctgaagtaaattcaattgcaaaatcttggcagaggcagaaatggctcatatcagaagtgtccaaataaaagttctgggaaactaggtatttgcttcccagagcaatgggaatagctccaaaggtcagagtaaggtaatgagaatctcccggtcaattccagtgccaggcttcctgaaagaagtcaaagcttggatcctcattttaaagggcgcatccatgactcatctagcagcccctctctatttttcccttcacttgatggtaaatccattctatatgtccatttactagctggacatagagaacttgagctcacctctgggagttaaatattccaccccaactatcccatattgatagcaactggactcagaggtccccctcctgtttgaaagtgaacacattgccaatgttttgagaatggcaaaagcaatagatacgaagctccatttttctaatatataaacaatatcatgtgagtaagggaagcgtgtgggaaagttgtccaagctcattcagtcccctaaatcctcgatactttaactgtctgagaaccaactgcataggcatcacctgggcagtgtttgaaaattccatttgcagaatcttaagcatcagaatctgcattttactaagatccccaaatgattcaattgcacactgaagtttgagaagcattgttctagacaaccatttccactaaaggttattttagttcatagtaacaatcctcttttggaaaggacagatcaagtctgtttgacttgcaatgaacaacactgcatgtaagcaggcaaaaaaagaaacatatcagtagtttaagattcacattatgctgaatcttatatgaattcacataaaagaatgacctgcaaaactacgcacaacttctgaaaggccaaggaatataatctaccttgagagacattaaccaaagacagtcaccctcaaagccaatgcagactaaatctttcctaacatagtctattctctaagaatagagaagatatgtatcagtcactcttatagtctgaaaacctaaacataaaagtaatctgcttttgacatataattttgtataatacgtatgaaaaaatgtgacagctaaggacttgaattaaatccctaaaaaacaattagccactcattaggccaagactttaattctatgatcaattagcactgtttatctgaattaagcttttttgtggtctaacaaaaagtttttttgtggtctatcaaggagacagctgttcaaatggaaggatacatgtggggcaggggggcggtgaagagacctagattctggtcctaactgctttgccttggagagattaattcccccctctaagcctcagtttcctctgaagatgttggaccagataacctctaaggtcctttgaaactgactccttgattccatgactcactgaatatttttctgcaaagataatcccaaccaatgccttctatcctaatctaacaaaaaattgctcttcatcatagaaatacaaagtaatcttcagtgatgtgctctttatactttgctttttaaaccgtccattccagttggtcttaatatattgcacaagtattttataagtgaaatgtgtacagaatcatattctaagattatgtgcaaatatatgtgtagaaagaggcatttaaaaaaagaggcaggagattgagaagagacatattgaatgaggcactaatctttagaaaaatgatcttttactgaatcaagccatgctcattccttgctgaatccaacagccccaaatctcttttcttatatttggctgttaatttttttccttgcaccatcctagattgttaacaaccattgcacagttggctcatgtatccttacactctgagttataataagttgtatttttataaacaaatacctaaatattcaagttttaaggcgcatggaaactgaatctaggcaacgggtgatttgtgtagcttacaacctgaacagcaagatgttccaattcattctaacagatgtgtataagcacaagttatatcagctgtgtcagatatttaacagatcctacatttattagctatataacagactctacattttcctaagtgcctaagaccaatcctggtagtcacttaagtacaaaagactcactttaactggcttggtctgaaggggtcaatcctttactgcctgtacaagatctgggcagttttgctctgtgtcttgtgatgacccagctgaatgtgaaaagcctatgagttattgagcaaccagaggtccctgcattccaagttgcagtttagctctggggaaactctggctttctctttcctcaagtgtccaccactgcccatcatttgcagaaagacttggccctgcctttagcaacttccctatctccttagagtagacaagaaagaaacagatttgtgcacattttacaaagtgccttcctctatttttttttaaagttttcattttgcaaggaaaaatgtattgattagaaagtaacatttgccttatagggattatatatatatatagatatagatatagatatgtatgaatggagagatgagaagaagccagaaagggcacaacaaaatggtctaagggccaaccagcaatgttcagtgaatgtttacgtattgtttaattgaatcaacacagagctgttgtgaatagtgtgacttactttgcctgataagaaattgaggctggctgtgatttggggataaacctgccaccctgtgatttgagactctccataccaaaacttattgatacatttttgaatgtcattggcttacatgcctaaacctgaagagaacaatgcatgcacattggaactttgtacacaaacagaaaaatataaatgactttgaattaccatcccaagcattgctaacgtagatgtgccattgacgaaagtctcatgtgttcttgagtgaacaaatttccttttcttcctttttggctcaagcacaataatgctgtcactgagacagtgactgagcactcaatgtccaagactaaatcacatcaccacgactaagtaggcactatgtcctgggatgagtcttttaaactctggccatcaggttccttacttgttaaataagtaggttggcctaaaaggtttctaagacctctcatgatctaggtaaaatccagggtttcaggtcagtgtccctggtgcagtgcaagaaagccttgctgacacacccttggcctgaagcagtgagcacatgagattgtgtgacaacgcttcagagaaaaacagagatctgttcctccaactcagattgatttaacatccttgcttctccttttccttcctggctttacatatttgtagggtttttactccttctccagagcctactattttcctaagagttagtagcaaccataggatccacaagaaatgaaattattcatcaacaatgactttggcactgcaaaagactgagtcaaaggttaaatcagtcacacagatatccaaggccaagttgaagatcacaagtatatcccatttagagatttgcatacttagagattaagcccatgttcattaattatttagttaattcaaaagccattaataaatccatgcccagcctacgcaacatagtaagacccagtctctacaaaaattttaaaaattagccagccatggtgacacgtacctgtagtcctagacacttgggaaggtgaagccagaggattgcttgagcccaggaggtcgaggctgcagtgaaccgtgattgtgtcactgcactccagcctgggtgagagagcaagaccttgtctcaataaataaacccaagttacttcgatgactagatactggaggtctgaaggagaagctttaaaaatacagattgattgcttcagagaaatcctatttataattatgatctgaacttattctatgattagcaaatatatcatctgaaaataaaacaggagttctctccccagacttttgtttttcaggatggtgagttttggtctgggaccctcatggcacccattttgataaaaggaaaaagatagtaaaacaggaaataggaagtttccagagatttgggcatctcaggattccatgaaatgctgagactaacccactaaatccaaattttattggctatggtaaatctaaatctgttcagtgttctgaacagattttatgagtttatgtctaagagtttatgtctaagagaggtacataattcacaaacactatcatgctggcagctgttttgtccacatcaattcccttgatttaatgctctgatttcaatttagaaagtactgagacatgtaaagtctcaaaataggaaaaacctatcctgtttataaggtgtggtcaataaatagaccacagataatcttagtctattaattaactctcagatcatcttagactattaattaacattctgcttgctgctgattaaaaagaaaaaaaccctaaaaccttcagcaactgaagtagtaatataaaaaataacctttaatagttatggtcaaattacgcttcacttggataaacctcaaaatgtagtctgagtttttttgtgcacacttcacaaatcctgggggaaaaatcttttttccacgttatctgaaaaactatatggcgaagataccgctgaaaaataatttgttttatgaaattcctgaaaagctaattttgaattttttaaagtaactacctcccttttgtgtcctaatgtccttccttcaaagctgcttatagtttagaaatgaaagatgtcatgtctcatgctttgactggttttcggtggcatatttgatgtatttgccaagtggcattactgactttacagtaactgttacattattttgtactatattgctttatgtggttcaaaaatagtatatgccatattgaaatatgtaatcctcatgttgtgaaactcatcatgtaatacaatgaaaatcattacttaataacttacaatttatccatatgtagtttcaatatgattgtgtctatgactgtaaaacaaactgaaaaaatatgtaatgtatttctgttgaaagcgtgaatgtactaattttttcctaatcttgtctagaagaaagattctatgtcattcattgtacagctgctctggggtgttacacatttaaagtacaatccaacagttgtttgaaagtcagcctctcggctttgtttcatgtgactgctgacacttctcaagtgttctttgcataatgaggctggattttgtgcttcatcgttcattttaaacaattgaaaagtctcatgtggaaaccaaagcaatctagaaccagcctgttgggtgactgtgtcttctgtaaagccatattgaagtgaagttatacataatagcataaggttccacattttcaaagctaccactacctctgcttttcctctttccctagaaaatgccaagcaaaattccccaacactaagtgagaaattagaagtaattgttttataattaagttgctgggttttttttttaacaccttctaattcatcactttgtagggttatgcaagagtttctgaataaccattcttacatgtttatattttataaaaaccggctgcaagaaagattcagaaagaatacttagtaagtcatcatatgaaaaaccaacaaaaccatagagtgcagattttttcctaactataagtcacctcatagttgtccaaagccatgataatgatatctcttacaaattgacttctgtaacccccctagaaataacccttttccttatttgattttagtcatcaaacatagtatgatatgggaaaagtcagccatttaccagaaattatcttattttgattttaaaaactcatttctatatgtagttattgtaatgtctatttttttagacttaaagatttatagaagactatagttatctgatttgttattttgcatttttcattctgtaaatctttgcttatggcacattgtgctctctgttttccatggttttattcatttatctcctcctattttgaggggacaacatgggtagttaaatctttgtcaatagtattggagataacactaactgctattatcataacatcttcatttttactgcatgccaaaaccaatgcctgccaaacaaaatcttagacatcccaatataatatgttagttatatttctattcacatcattattgaaaatacccagctcagtgcctggcttaataaatgtttaattcccttacctactcttgctctatttttttatttgaaatggagatgagcaaaataacacattcatggctgaagcaattttttggacatttcttgttaccaaaagatctataatcaggacattgtttatgtaagttggacaaaaaaaattcttcccctttatgtccacccttcctatgattgcaagacaaaatttccctcctttacctcatccctataacatgggaggctgagaaaaatgaggggagatggaaccagatacaaggagatccaataagagaagcttatttaaatattgtgaaataaaggaagaaccaaagcatttttttaagtggggaatccttttgaacagttattatttatccatattattaacaacatcttttctgacaaaatccatcagatgaagtgtaaatggataatcttttaatggatctaaacctagaaagtttcacttactgttcatgtccgtgttccagaattgtgaaatggtgtgtggttttgctttccaagttcttctctgcctcctcttaattctctaattccatgtcttacagaagaatgagaaatttctttcttacttgagtatcatgctctaaaaaacttggcttcagtcacagaaacgctggctctcctgtgcttatattgaagccaactgcctttaattcttgggccctcttatatttttaaggtgcaaaatttgaagtctcagtcaccagacacaggttctatacaattaatgatgagctggagaagtaatatgtagctaatttttcaaaagcattgaatatactttccggaaagaaaacagaaattaaatattgccacatcttgccagaatcccatctgacaccttaactttgtcaggtttcctacaacttgctaatcaagttttatacattctaaatctccccagtttctttggggctggaagatgcaacttccatttaatagaaactttgaaatcttggggtaagggagcagtggggggactagggagaaggataagaaatagaattattgaaaagcccccaccagggaccttcctggccagaatatgcagagtaattcctgctggcttcacctttgaaagtccctcgaaactatgcagatgaaactgagtctgtttttgatattgtcagatgtattctaccttggaagtcccaacacctaaactggaattcttgtatttacatctcctccactgtcccccacaccacccctcaattcctgctgcccctgctaatgttaagcatttttctcttgttatcatcaggttcacattaaaaacagatacttacaaactgacttgaagcacagatacttttacgaatgtgataaaatattttcttaagaaaaggaaagaggatgtgggtcaaataaaacaccgcatggatgttgattggtgaatactggtgtaagaaaagggagctcaggaatttttattactgtatttgtaaatgagtttgaaggaatttgtaaatgccactggtacatttttaaggtgacacatttgctccttataaagttattaaaaattacagggtaagcttaaatgacgtttgccagtagttttactttatataatcaatattgatattgttgctgaactatgtaactttatgatgcatttttcagtcccttttcagagcaaatgcttttgcaatggtagtaatgtttagtttaaattgacttaataaattattacctgagcaatggttaaaaaa

SEQ ID NO: 25 - DNA, 1790 bp, Homo sapiens
atggattaactcgaactccaggctgtcatggcggcaggacggcgaacttgcagtatctccacgacccgcccctacaggtgccagtgcctccagaatgtggcagctcacaagcctcctgctgttcgtggccacctggggaatttccggcacaccagctcctcttgactcagtgttctccagcagcgagcgtgcccaccaggtgctgcggatccgcaaacgtgccaactccttcctggaggagctccgtcacagcagcctggagcgggagtgcatagaggagatctgtgacttcgaggaggccaaggaaattttccaaaatgtggatgacacactggccttctggtccaagcacgtcgacggtgaccagtgcttggtcttgcccttggagcacccgtgcgccagcctgtgctgcgggcacggcacgtgcatcgacggcatcggcagcttcagctgcgactgccgcagcggctgggagggccgcttctgccagcgcgaggtgagcttcctcaattgctcgctggacaacggcggctgcacgcattactgcctagaggaggtgggctggcggcgctgtagctgtgcgcctggctacaagctgggggacgacctcctgcagtgtcaccccgcagtgaagttcccttgtgggaggccctggaagcggatggagaagaagcgcagtcacctgaaacgagacacagaagaccaagaagaccaagtagatccgcggctcattgatgggaagatgaccaggcggggagacagcccctggcaggtggtcctgctggactcaaagaagaagctggcctgcggggcagtgctcatccacccctcctgggtgctgacagcggcccactgcatggatgagtccaagaagctccttgtcaggcttggagagtatgacctgcggcgctgggagaagtgggagctggacctggacatcaaggaggtcttcgtccaccccaactacagcaagagcaccaccgacaatgacatcgcactgctgcacctggcccagcccgccaccctctcgcagaccatagtgcccatctgcctcccggacagcggccttgcagagcgcgagctcaatcaggccggccaggagaccctcgtgacgggctggggctaccacagcagccgagagaaggaggccaagagaaaccgcaccttcgtcctcaacttcatcaagattcccgtggtcccgcacaatgagtgcagcgaggtcatgagcaacatggtgtctgagaacatgctgtgtgcgggcatcctcggggaccggcaggatgcctgcgagggcgacagtggggggcccatggtcgcctccttccacggcacctggttcctggtgggcctggtgagctggggtgagggctgtgggctccttcacaactacggcgtttacaccaaagtcagccgctacctcgactggatccatgggcacatcagagacaaggaagccccccagaagagctgggcaccttagcgaccctccctgcagggctgggcttttgcatggcaatggatgggacattaaagggacatgtaacaagcacaccggcctgctgttctgtccttccatccctcttttgggctcttctggagggaagtaacatttactgagcacctgttgtatgtcacatgccttatgaatagaatcttaactcctagagcaactctgtggggtggggaggagcagatccaagttttgcggggtctaaagctgtgtgtgttgagggggatactctgtttatgaaaaagaataaaaaacacaaccacgaagccaaaaaaaaaaa

SEQ ID NO: 26 - DNA, 3875 bp, Homo sapiens
agctgttcttggctgacttcacatcaaaactcctatactgacctgagacagaggcagcagtgatacccacctgagagatcctgtgtttgaacaactgcttcccaaaacggaaagtatttcaagcctaaacctttgggtgaaaagaactcttgaagtcatgattgcttcacagtttctctcagctctcactttggtgcttctcattaaagagagtggagcctggtcttacaacacctccacggaagctatgacttatgatgaggccagtgcttattgtcagcaaaggtacacacacctggttgcaattcaaaacaaagaagagattgagtacctaaactccatattgagctattcaccaagttattactggattggaatcagaaaagtcaacaatgtgtgggtctgggtaggaacccagaaacctctgacagaagaagccaagaactgggctccaggtgaacccaacaataggcaaaaagatgaggactgcgtggagatctacatcaagagagaaaaagatgtgggcatgtggaatgatgagaggtgcagcaagaagaagcttgccctatgctacacagctgcctgtaccaatacatcctgcagtggccacggtgaatgtgtagagaccatcaataattacacttgcaagtgtgaccctggcttcagtggactcaagtgtgagcaaattgtgaactgtacagccctggaatcccctgagcatggaagcctggtttgcagtcacccactgggaaacttcagctacaattcttcctgctctatcagctgtgataggggttacctgccaagcagcatggagaccatgcagtgtatgtcctctggagaatggagtgctcctattccagcctgcaatgtggttgagtgtgatgctgtgacaaatccagccaatgggttcgtggaatgtttccaaaaccctggaagcttcccatggaacacaacctgtacatttgactgtgaagaaggatttgaactaatgggagcccagagccttcagtgtacctcatctgggaattgggacaacgagaagccaacgtgtaaagctgtgacatgcagggccgtccgccagcctcagaatggctctgtgaggtgcagccattcccctgctggagagttcaccttcaaatcatcctgcaacttcacctgtgaggaaggcttcatgttgcagggaccagcccaggttgaatgcaccactcaagggcagtggacacagcaaatcccagtttgtgaagctttccagtgcacagccttgtccaaccccgagcgaggctacatgaattgtcttcctagtgcttctggcagtttccgttatgggtccagctgtgagttctcctgtgagcagggttttgtgttgaagggatccaaaaggctccaatgtggccccacaggggagtgggacaacgagaagcccacatgtgaagctgtgagatgcgatgctgtccaccagcccccgaagggtttggtgaggtgtgctcattcccctattggagaattcacctacaagtcctcttgtgccttcagctgtgaggagggatttgaattacatggatcaactcaacttgagtgcacatctcagggacaatggacagaagaggttccttcctgccaagtggtaaaatgttcaagcctggcagttccgggaaagatcaacatgagctgcagtggggagcccgtgtttggcactgtgtgcaagttcgcctgtcctgaaggatggacgctcaatggctctgcagctcggacatgtggagccacaggacactggtctggcctgctacctacctgtgaagctcccactgagtccaacattcccttggtagctggactttctgctgctggactctccctcctgacattagcaccatttctcctctggcttcggaaatgcttacggaaagcaaagaaatttgttcctgccagcagctgccaaagccttgaatcagatggaagctaccaaaagccttcttacatcctttaagttcaaaagaatcagaaacaggtgcatctggggaactagagggatacactgaagttaacagagacagataactctcctcgggtctctggcccttcttgcctactatgccagatgcctttatggctgaaaccgcaacacccatcaccacttcaatagatcaaagtccagcaggcaaggacggccttcaactgaaaagactcagtgttccctttcctactctcaggatcaagaaagtgttggctaatgaagggaaaggatattttcttccaagcaaaggtgaagagaccaagactctgaaatctcagaattccttttctaactctcccttgctcgctgtaaaatcttggcacagaaacacaatattttgtggctttctttcttttgcccttcacagtgtttcgacagctgattacacagttgctgtcataagaatgaataataattatccagagtttagaggaaaaaaatgactaaaaatattataacttaaaaaaatgacagatgttgaatgcccacaggcaaatgcatggagggttgttaatggtgcaaatcctactgaatgctctgtgcgagggttactatgcacaatttaatcactttcatccctatgggattcagtgcttcttaaagagttcttaaggattgtgatatttttacttgcattgaatatattataatcttccatacttcttcattcaatacaagtgtggtagggacttaaaaaacttgtaaatgctgtcaactatgatatggtaaaagttacttattctagattaccccctcattgtttattaacaaattatgttacatctgttttaaatttatttcaaaaagggaaactattgtcccctagcaaggcatgatgttaaccagaataaagttctgagtgtttttactacagttgttttttgaaaacatggtagaattggagagtaaaaactgaatggaaggtttgtatattgtcagatattttttcagaaatatgtggtttccacgatgaaaaacttccatgaggccaaacgttttgaactaataaaagcataaatgcaaacacacaaaggtataattttatgaatgtctttgttggaaaagaatacagaaagatggatgtgctttgcattcctacaaagatgtttgtcagatatgatatgtaaacataattcttgtatattatggaagattttaaattcacaatagaaactcaccatgtaaaagagtcatctggtagatttttaacgaatgaagatgtctaatagttattccctatttgttttcttctgtatgttagggtgctctggaagagaggaatgcctgtgtgagcaagcatttatgtttatttataagcagatttaacaattccaaaggaatctccagttttcagttgatcactggcaatgaaaaattctcagtcagtaattgccaaagctgctctagccttgaggagtgtgagaatcaaaactctcctacacttccattaacttagcatgtgttgaaaaaaaagtttcagagaagttctggctgaacactggcaacaacaaagccaacagtcaaaacagagatgtgataaggatcagaacagcagaggttcttttaaaggggcagaaaaactctgggaaataagagagaacaactactgtgatcaggctatgtatggaatacagtgttattttctttgaaattgtttaagtgttgtaaatatttatgtaaactgcattagaaattagctgtgtgaaataccagtgtggtttgtgtttgagttttattgagaattttaaattataacttaaaatattttataatttttaaagtatatatttatttaagcttatgtcagacctatttgacataacactataaaggttgacaataaatgtgcttatgttta

SEQ ID NO: 27 - DNA, 2442 bp, Homo sapiens
aggaggaaggggagggaaaaggggaggaggaggaggatgtgagactgggttagagaaatgaaagaaagcaaggctttctgttgacattcagtgcagtctacctgcagcacagcacactccctttgggcaaggacctgagacccttgtgctaagtcaagaggctcaatgggctgcagaagaactagagaaggaccaagcaaagccatgatatttccatggaaatgtcagagcacccagagggacttatggaacatcttcaagttgtgggggtggacaatgctctgttgtgatttcctggcacatcatggaaccgactgctggacttaccattattctgaaaaacccatgaactggcaaagggctagaagattctgccgagacaattacacagatttagttgccatacaaaacaaggcggaaattgagtatctggagaagactctgcctttcagtcgttcttactactggataggaatccggaagataggaggaatatggacgtgggtgggaaccaacaaatctcttactgaagaagcagagaactggggagatggtgagcccaacaacaagaagaacaaggaggactgcgtggagatctatatcaagagaaacaaagatgcaggcaaatggaacgatgacgcctgccacaaactaaaggcagccctctgttacacagcttcttgccagccctggtcatgcagtggccatggagaatgtgtagaaatcatcaataattacacctgcaactgtgatgtggggtactatgggccccagtgtcagtttgtgattcagtgtgagcctttggaggccccagagctgggtaccatggactgtactcaccctttgggaaacttcagcttcagctcacagtgtgccttcagctgctctgaaggaacaaacttaactgggattgaagaaaccacctgtggaccatttggaaactggtcatctccagaaccaacctgtcaagtgattcagtgtgagcctctatcagcaccagatttggggatcatgaactgtagccatcccctggccagcttcagctttacctctgcatgtaccttcatctgctcagaaggaactgagttaattgggaagaagaaaaccatttgtgaatcatctggaatctggtcaaatcctagtccaatatgtcaaaaattggacaaaagtttctcaatgattaaggagggtgattataaccccctcttcattccagtggcagtcatggttactgcattctctgggttggcatttatcatttggctggcaaggagattaaaaaaaggcaagaaatccaagagaagtatgaatgacccatattaaatcgcccttggtgaaagaaaattcttggaatactaaaaatcatgagatcctttaaatccttccatgaaacgttttgtgtggtggcacctcctacgtcaaacatgaagtgtgtttccttcagtgcatctgggaagatttctacctgaccaacagttccttcagcttccatttcgcccctcatttatccctcaacccccagcccacaggtgtttatacagctcagctttttgtcttttctgaggagaaacaaataagaccataaagggaaaggattcatgtggaatataaagatggctgactttgctctttcttgactcttgttttcagtttcaattcagtgctgtacttgatgacagacacttctaaatgaagtgcaaatttgatacatatgtgaatatggactcagttttcttgcagatcaaatttcacgtcgtcttctgtatactgtggaggtacactcttatagaaagttcaaaaagtctacgctctcctttctttctaactccagtgaagtaatggggtcctgctcaagttgaaagagtcctatttgcactgtagcctcgccgtctgtgaattggaccatcctatttaactggcttcagcctccccaccttcttcagccacctctctttttcagttggctgacttccacacctagcatctcatgagtgccaagcaaaaggagagaagagagaaatagcctgcgctgttttttagtttgggggttttgctgtttccttttatgagacccattcctatttcttatagtcaatgtttcttttatcacgatattattagtaagaaaacatcactgaaatgctagctgcaagtgacatctctttgatgtcatatggaagagttaaaacaggtggagaaattccttgattcacaatgaaatgctctcctttcccctgcccccagaccttttatccacttacctagattctacatattctttaaatttcatctcaggcctccctcaaccccaccacttcttttataactagtcctttactaatccaacccatgatgagctcctcttcctggcttcttactgaaaggttaccctgtaacatgcaattttgcatttgaataaagcctgctttttaagtgttaact

SEQ ID NO: 28 - DNA, 2352 bp, Homo sapiens
ggtggtttccggcggaggtggtgagagtcgcacgcgcagcggggaaggtgtgagtcgtgaacggcccgggtctccgccatggcctctctactcgccaaggacgcctacctgcagagcctggccaagaagatctgctcccattcggccccggaacagcaggcgcgcacgcgggctggcaaaactcaaggctcagaaactgcagggcccccaaaaaagaaaaggaagaaaacacaaaagaaattccggaagcgagaagagaaggctgctgagcacaaggccaagtccttgggggagaaatctccagcagcctctggggccaggaggcctgaggcagccaaagaggaagcagcttgggcttccagctcagcagggaaccctgcagatggcctggccactgagcctgagtctgtctttgctctggatgttctgcgacagcgactgcatgagaagatccaggaggcccggggccagggcagtgccaaggagctgtcccctgccgccttggagaaaaggcggcggagaaagcaggaacgggaccggaagaagaggaagcgaaaggagctgcgggcgaaagagaaggccaggaaggctgaggaggccacggaggcccaggaggtggtggaggcaaccccagagggggcctgcacggagccgcgggagccgcccgggctgatcttcaataaggtggaggtgagcgaagacgagccggccagcaaggcgcagcgcagaaaagagaagaggcagagggtgaaggggaacctcacgccgctgaccgggaggaactaccggcagctgctggagcgcctgcaggcacggcagagccggctggacgagctgcgcggccaggatgaggggaaggcgcaggagctggaggcgaagatgaagtggaccaacctcctctacaaggcggagggcgtgaagatccgtgacgacgaacgcctgctgcaggaggccctgaagcgcaaggagaagcgcagggcgcagcggcagcgccggtgggagaagcgcacggccggcgtggtggagaagatgcagcagcgccaggaccggcggcggcagaacctgcgcaggaagaaggcggcccgcgccgagcgccgcctgctcagagcccgcaagaagggccgcatcctgccgcaggacctggagcgcgcaggcctggtctgagtctttcccacctggggccgccgtcttccgtcctaggagactccaggacaccctctgagtccttgacgctggctctgtcccaggatctccacagacctcggcctctccatgtgagggggacacagtggtgctctgctgagttgtgagggcccagatcacagatcccatgtgagaaagagagagtttcagcgtcatccttgaacgcaggatccgggaccttcagacccagggaaagggtgagggagactggggcctggtctgctttcccgggcctgaaagcttccccgaggtttgcagggtcagggaggaggaacggtgggggtgggcagtcactgcctgttccccactgcctgtgttcgcaggagccacgggacagaagacggtggcctctgctgccgggccacgttagtccgcagctcacccgaacagaggacaaccctgaggtgtggcatatgggcacctggcactgggagtcgggggagcacgtccaggcgtggtgcatcctggggcagaacgccatggctcctccccgctctcttggcttctgcctgttggggtctcattcctttctgttccccagtgccccggggcggcattttactgctcagaatttggagggagggagcagtaccttcccggagtccacgcatgtgagttgggtcaagtgcattggacctagggaaagagaaagaaagaataaaagctggagagagagtgaagtgaatgcaagataaaaagtgggatggaagaattaaatccagagttccaggcaatcaaaatgagtgcaggttgaaagaaaacaggtgaattttagtggcatatggatgataaagctgtaaataaaattcttttgatgaaactctccggttacgagacaaagactgtaactgaacaggagctggtgtgactgttaccagacagaggcaactgatgaaaaagccctgtgaaagataggatgtgaggtgagcatgagcttgagctgagagacagacacaacagtatctgaaaagaatacatactctttccatgcatatatggaacatggatggaaactgaccacctactttgtccagaaaagaagtcttaagatatttcaaggaatcagtgtcgttatctgaccgtatcccaatgtcattaaaaaaaatttgagctaaaaaaaaaaaaaaaaaaaaaaaaaaaaaaaaaaaa

SEQ ID NO: 29 - DNA, 1159 bp, Homo sapiens
agtgccccaggagctatgacaagcaaaggaacatacttgcctggagatagcctttgcgatatttaaatgtccgtggatacagaaatctctgcaggcaagttgctccagagcatattgcaggacaagcctgtaacgaatagttaaattcacggcatctggattcctaatccttttccgaaatggcaggtgtgagtgcctgtataaaatattctatgtttaccttcaacttcttgttctggctatgtggtatcttgatcctagcattagcaatatgggtacgagtaagcaatgactctcaagcaatttttggttctgaagatgtaggctctagctcctacgttgctgtggacatattgattgctgtaggtgccatcatcatgattctgggcttcctgggatgctgcggtgctataaaagaaagtcgctgcatgcttctgttgtttttcataggcttgcttctgatcctgctcctgcaggtggcgacaggtatcctaggagctgttttcaaatctaagtctgatcgcattgtgaatgaaactctctatgaaaacacaaagcttttgagcgccacaggggaaagtgaaaaacaattccaggaagccataattgtgtttcaagaagagtttaaatgctgcggtttggtcaatggagctgctgattggggaaataattttcaacactatcctgaattatgtgcctgtctagataagcagagaccatgccaaagctataatggaaaacaagtttacaaagagacctgtatttctttcataaaagacttcttggcaaaaaatttgattatagttattggaatatcatttggactggcagttattgagatactgggtttggtgttttctatggtcctgtattgccagatcgggaacaaatgaatctgtggatgcatcaacctatcgtcagtcaaacccctttaaaatgttgctttggctttgtaaatttaaatatgtaagtgctatataagtcaggagcagctgtctttttaaaatgtctcggctagctagaccacagatatcttctagacatattgaacacatttaagatttgagggatataagggaaaatgatatgaatgtgtatttttactcaaaataaaagtaactgtttacgttaaaaaaaaaaaaaaaaaaaaaaaaaaaaa

SEQ ID NO: 30 - DNA, 2344 bp, Homo sapiens
agttttacttccgtttgtttaacagctggcccggaagtttaagtgaatatgcggcttgggctccaaaagttgctgtacggtattttattttaaagtagaaatctgtccgcttttcacttacggaggccttacagtgtgtgttctgtgttacttgagtttatacgcactgcagaatttgtttaccctgctcttttggaaacgtattccggaagcgaaaccctgagtaatcggaagtggttaggagtgagagagctgctggatatgcggagggactgggcgggtcggcttccgaatggaagaggtctgtgagaagttaacctggtgataccgatccgaagagcctatcaagtgaagccccctgaaatacggagaataagaatcttagaggttgttcagcagaagtcttggagtgcattttcagtggttaaggtgaaaaaatgactactaaaaatttagaaaccaaagtcaccgttacttcatccccaatccgaggagcaggagatggaatggaaactgaggaaccacctaaatctgttgaagttacctccggagtccaatctagaaagcatcatagtcttcagagtccatggaagaaagcagttccatcagagagcccaggagttcttcagctagggaaaatgctcactgaaaaagcaatggaagttaaagctgtaagaatattagttcccaaagctgctataactcatgatatccccaacaaaaatacaaaggttaagtctctgggacatcataaaggagaattccttggtcagtcagagggagttatagaacctaataaggaactctcagaggtaaagaatgtattggaaaagctcaagaattctgaaagaaggttactacaggacaaagaaggtctttcaaaccagctccgtgtacagacagaggtaaatcgtgagttaaaaaagttactggtggcttctgttggggatgatcttcagtatcactttgaacgtctagcccgtgagaaaaatcagcttattttagaaaatgaagccctaggtcgaaacacagctcagctttctgaacagttagaacgtatgtcaatacagtgtgatgtatggcgaagtaaattccttgcaagcagggtaatggcagatgagttaaccaactcaagagcagctttacagcgtcaaaaccgtgatgcacacggggctatacaagatctcctaagtgaacgggaacagtttcgtcaagaaatgatagctacccagaaattattggaggagctcttagtttccttgcaatggggaagagagcaaacttactcccctagtgtacaaccccacagcacagcagagctagcattaacaaatcacaagttggcaaaagcagtaaattctcatcttctgggaaatgttggcattaacaatcaaaaaaagattccatcaacagttgaattctgcagcaccccagctgagaaaatggctgaaacggttctaagaattttagatccagttacctgcaaagagagttcacctgataatccattttttgagtcttcaccaaccaccttacttgctacaaagaaaaatattggacgatttcatccctatactagatatgaaaatataactttcaattgctgcaatcactgccggggagaactgattgccctttaacagtcaatatgttggaggcatgctaagaataaacaactaaataactgtattagaaaaaaaagaaacttactaaatatcataatctgatgatatgtggtcctgaattggctactagtttaagcaaataaactgtaagtcatttatgggttagttggggaataaatggatatgggctggatattcggtaatatcattaatgaaaagcagattgcagaaatacagtatgatctcagtattttgaaattgtaaatacatgtacagacaaatacttagacagtatgcatactggtgttaacagtcacaatttctgggtgatgaaaatgtaacttgaaaccgctccatttctacaatgcacatttactgtttctgttataataaaagggtatgttagaaaaacaaaaaggaggctgggcatggtggctcatgcctctaatctcagcactttgggaggccaaggtgggcggatcacttgaggtctggagtttgagaccagcctgagcaacatggtgagaccccatctctacaaaaaaaatataaaaattagccaggtgtggtggtgcacacctgtggtcccagctacttgggaggctgaggtgggaaaatcacttgaacctgggagggtgaggttgcagtgagctgagatcatgccactgcactccagcctgggtgacaggaaaaaaaaaaaaaaaaaaaaaaaaaaaaaa

SEQ ID NO: 31 - DNA, 4446 bp, Homo sapiens
ttcttaaccctttccagctttcccaccctctttggctttagccatggccttctgatctgtgtttctcaggggacctgcaggccccagatatagccccatgctgtcctcctaccccagagcacactgttcaggctacttccactggtactgaaatccagtatttcacttactctttttctttccaatatcctcatgacattcaatatttcacttactctaggtcctccctgcctaaggcccaagtcaactttctgtccagtgggatttgtaatccaatacctcctagccctagcagaatcccatgtggataatcagaaatgtgactggaaaaaggacagagctctatggctgtgggtcccagtccccactgctggcagtaagtccccagcagtgagctgtgtaagcaccttacattctgcgcttggttgaaaacagcaaggcaagcatccacttgagaaatgtcaacccctaggaaatcccagcctcaagtctttctcatcccttgggaagtgcaaattggatagagaagaaaccaattaaaaacaaaacaaacaaatcatacttagatattctggcttttctcaccagggctggattaaagcatgtacttcaaaataataacaacttaagtcaataaataaatgtaaggaagtccaaatgttcacctgaagacaactgtggtcattttttggcaatcccaggttctcttttctacctgtttgctcaatcgtggtctccctctccctctcttgttggggcccatgcccctgctttactgttgccagaggcttgtacttgtttgccttttaggtaggagcagttacttccactcccctcacctgccataaagcatctttataaacaaagcaagtagaagaaacacatcctggtatccaccacattcggcttttgttgattctgttcacttgggagcacctgctgctagggaataagaaggttgaggctgaagagtgaggactcttcagctcccctctggcaggacccgggagaggaaagagccctcagctggtccatcctccccactcctggtcagccttctgttctgagatcaaagtggtggggtcacattctcgagaactgtgctcagccccctcatctcacaccctttccctctccctgtgtgcctgcccccctcttacataaccatgctggtgattggcaccgtcataaatcaatactttgctcactttcacatcaagtaacactatccagggaggtggtttcaacaaaggaggaagtataaggagatctaggttcaaattaatgttgcccctagtggtaaaggacagagaccctcagactgatgaaatgcactcagaattacttagacaaagcggatatttgccactctcttccccttttcctgtgtttttgtagtgaagagacctgaaagaaaaaagtagggagaacataatgagaacaaatacggtaatctcttcatttgctagttcaagtgctggacttgggacttaggaggggcaatggagccgcttagtgcctacatctgacttggactgaaatataggtgagagacaagattgtctcatatccggggaaatcataacctatgactaggacgggaagaggaagcactgcctttacttcagtgggaatctcggcctcagcctgcaagccaagtgttcacagtgagaaaagcaagagaataagctaatactcctgtcctgaacaaggcagcggctccttggtaaagctactccttgatcgatcctttgcaccggattgttcaaagtggaccccaggggagaagtcggagcaaagaacttaccaccaagcagtccaagaggcccagaagcaaacctggaggtgagacccaaagaaagctggaaccatgctgactttgtacactgtgaggacacagagtctgttcctggaaagcccagtgtcaacgcagatgaggaagtcggaggtccccaaatctgccgtgtatgtggggacaaggccactggctatcacttcaatgtcatgacatgtgaaggatgcaagggctttttcaggagggccatgaaacgcaacgcccggctgaggtgccccttccggaagggcgcctgcgagatcacccggaagacccggcgacagtgccaggcctgccgcctgcgcaagtgcctggagagcggcatgaagaaggagatgatcatgtccgacgaggccgtggaggagaggcgggccttgatcaagcggaagaaaagtgaacggacagggactcagccactgggagtgcaggggctgacagaggagcagcggatgatgatcagggagctgatggacgctcagatgaaaacctttgacactaccttctcccatttcaagaatttccggctgccaggggtgcttagcagtggctgcgagttgccagagtctctgcaggccccatcgagggaagaagctgccaagtggagccaggtccggaaagatctgtgctctttgaaggtctctctgcagctgcggggggaggatggcagtgtctggaactacaaacccccagccgacagtggcgggaaagagatcttctccctgctgccccacatggctgacatgtcaacctacatgttcaaaggcatcatcagctttgccaaagtcatctcctacttcagggacttgcccatcgaggaccagatctccctgctgaagggggccgctttcgagctgtgtcaactgagattcaacacagtgttcaacgcggagactggaacctgggagtgtggccggctgtcctactgcttggaagacactgcaggtggcttccagcaacttctactggagcccatgctgaaattccactacatgctgaagaagctgcagctgcatgaggaggagtatgtgctgatgcaggccatctccctcttctccccagaccgcccaggtgtgctgcagcaccgcgtggtggaccagctgcaggagcaattcgccattactctgaagtcctacattgaatgcaatcggccccagcctgctcataggttcttgttcctgaagatcatggctatgctcaccgagctccgcagcatcaatgctcagcacacccagcggctgctgcgcatccaggacatacacccctttgctacgcccctcatgcaggagttgttcggcatcacaggtagctgagcggctgcccttgggtgacacctccgagaggcagccagacccagagccctctgagccgccactcccgggccaagacagatggacactgccaagagccgacaatgccctgctggcctgtctccctagggaattcctgctatgacagctggctagcattcctcaggaaggacatgggtgccccccacccccagttcagtctgtagggagtgaagccacagactcttacgtggagagtgcactgacctgtaggtcaggaccatcagagaggcaaggttgccctttccttttaaaaggccctgtggtctggggagaaatccctcagatcccactaaagtgtcaaggtgtggaagggaccaagcgaccaaggatgggccatctggggtctatgcccacatacccacgtttgttcgcttcctgagtcttttcattgctacctctaatagtcctgtctcccacttcccactcgttcccctcctcttccgagctgctttgtgggctccaggcctgtactcatcggcaggcgcatgagtatctgtgggagtcctctagagagatgagaagccaggaggcctgcaccaaatgtcagaagcttggcatgacctcattccggccacatcattctgtgtctctgcatccatttgaacacattattaagcaccgataataggtagcctgctgtggggtatacagcattgactcagatatagatcctgagctcacagagtttatagttaaaaaaacaaacagaaacacaaacaatttggatcaaaaggagaaatgataagtgacaaaagcagcacaaggaatttccctgtgtggatgctgagctgtgatggcgggcactgggtacccaagtgaaggttcccgaggacatgagtctgtaggagcaagggcacaaactgcagctgtgagtgcgtgtgtgtgatttggtgtaggtaggtctgtttgccacttgatggggcctgggtttgttcctggggctggaatgctgggtatgctctgtgacaaggctacgctgacaatcagttaaacacaccggagaagaaccatttacatgcaccttatatttctgtgtacacatctattctcaaagctaaagggtatgaaagtgcctgccttgtttatagccacttgtgagtaaaaatttttttgcattttcacaaattatactttatataaggcattccacacctaagaactagttttgggaaatgtagccctgggtttaatgtcaaatcaaggcaaaaggaattaaataatgtacttttggctaaaaaaaaaaaaaaaaaaaaaaaaaaaaaa

SEQ ID NO: 32 - DNA, 4335 bp, Homo sapiens
ttcttaaccctttccagctttcccaccctctttggctttagccatggccttctgatctgtgtttctcaggggacctgcaggccccagatatagccccatgctgtcctcctaccccagagcacactgttcaggctacttccactggtactgaaatccagtatttcacttactctttttctttccaatatcctcatgacattcaatatttcacttactctaggtcctccctgcctaaggcccaagtcaactttctgtccagtgggatttgtaatccaatacctcctagccctagcagaatcccatgtggataatcagaaatgtgactggaaaaaggacagagctctatggctgtgggtcccagtccccactgctggcagtaagtccccagcagtgagctgtgtaagcaccttacattctgcgcttggttgaaaacagcaaggcaagcatccacttgagaaatgtcaacccctaggaaatcccagcctcaagtctttctcatcccttgggaagtgcaaattggatagagaagaaaccaattaaaaacaaaacaaacaaatcatacttagatattctggcttttctcaccagggctggattaaagcatgtacttcaaaataataacaacttaagtcaataaataaatgtaaggaagtccaaatgttcacctgaagacaactgtggtcattttttggcaatcccaggttctcttttctacctgtttgctcaatcgtggtctccctctccctctcttgttggggcccatgcccctgctttactgttgccagaggcttgtacttgtttgccttttaggtaggagcagttacttccactcccctcacctgccataaagcatctttataaacaaagcaagtagaagaaacacatcctggtatccaccacattcggcttttgttgattctgttcacttgggagcacctgctgctagggaataagaaggttgaggctgaagagtgaggactcttcagctcccctctggcaggacccgggagaggaaagagccctcagctggtccatcctccccactcctggtcagccttctgttctgagatcaaagtggtggggtcacattctcgagaactgtgctcagccccctcatctcacaccctttccctctccctgtgtgcctgcccccctcttacataaccatgctggtgattggcaccgtcataaatcaatactttgctcactttcacatcaagtaacactatccagggaggtggtttcaacaaaggaggaagtataaggagatctaggttcaaattaatgttgcccctagtggtaaaggacagagaccctcagactgatgaaatgcactcagaattacttagacaaagcggatatttgccactctcttccccttttcctgtgtttttgtagtgaagagacctgaaagaaaaaagtagggagaacataatgagaacaaatacggtaatctcttcatttgctagttcaagtgctggacttgggacttaggaggggcaatggagccgcttagtgcctacatctgacttggactgaaatataggtgagagacaagattgtctcatatccggggaaatcataacctatgactaggacgggaagaggaagcactgcctttacttcagtgggaatctcggcctcagcctgcaagccaagtgttcacagtgagaaaagcaagagaataagctaatactcctgtcctgaacaaggcagcggctccttggtaaagctactccttgatcgatcctttgcaccggattgttcaaagtggaccccaggggagaagtcggagcaaagaacttaccaccaagcagtccaagaggcccagaagcaaacctggaggtgagacccaaagaaagctggaaccatgctgactttgtacactgtgaggacacagagtctgttcctggaaagcccagtgtcaacgcagatgaggaagtcggaggtccccaaatctgccgtgtatgtggggacaaggccactggctatcacttcaatgtcatgacatgtgaaggatgcaagggctttttcaggagggccatgaaacgcaacgcccggctgaggtgccccttccggaagggcgcctgcgagatcacccggaagacccggcgacagtgccaggcctgccgcctgcgcaagtgcctggagagcggcatgaagaaggagatgatcatgtccgacgaggccgtggaggagaggcgggccttgatcaagcggaagaaaagtgaacggacagggactcagccactgggagtgcaggggctgacagaggagcagcggatgatgatcagggagctgatggacgctcagatgaaaacctttgacactaccttctcccatttcaagaatttccgggtctctctgcagctgcggggggaggatggcagtgtctggaactacaaacccccagccgacagtggcgggaaagagatcttctccctgctgccccacatggctgacatgtcaacctacatgttcaaaggcatcatcagctttgccaaagtcatctcctacttcagggacttgcccatcgaggaccagatctccctgctgaagggggccgctttcgagctgtgtcaactgagattcaacacagtgttcaacgcggagactggaacctgggagtgtggccggctgtcctactgcttggaagacactgcaggtggcttccagcaacttctactggagcccatgctgaaattccactacatgctgaagaagctgcagctgcatgaggaggagtatgtgctgatgcaggccatctccctcttctccccagaccgcccaggtgtgctgcagcaccgcgtggtggaccagctgcaggagcaattcgccattactctgaagtcctacattgaatgcaatcggccccagcctgctcataggttcttgttcctgaagatcatggctatgctcaccgagctccgcagcatcaatgctcagcacacccagcggctgctgcgcatccaggacatacacccctttgctacgcccctcatgcaggagttgttcggcatcacaggtagctgagcggctgcccttgggtgacacctccgagaggcagccagacccagagccctctgagccgccactcccgggccaagacagatggacactgccaagagccgacaatgccctgctggcctgtctccctagggaattcctgctatgacagctggctagcattcctcaggaaggacatgggtgccccccacccccagttcagtctgtagggagtgaagccacagactcttacgtggagagtgcactgacctgtaggtcaggaccatcagagaggcaaggttgccctttccttttaaaaggccctgtggtctggggagaaatccctcagatcccactaaagtgtcaaggtgtggaagggaccaagcgaccaaggatgggccatctggggtctatgcccacatacccacgtttgttcgcttcctgagtcttttcattgctacctctaatagtcctgtctcccacttcccactcgttcccctcctcttccgagctgctttgtgggctccaggcctgtactcatcggcaggcgcatgagtatctgtgggagtcctctagagagatgagaagccaggaggcctgcaccaaatgtcagaagcttggcatgacctcattccggccacatcattctgtgtctctgcatccatttgaacacattattaagcaccgataataggtagcctgctgtggggtatacagcattgactcagatatagatcctgagctcacagagtttatagttaaaaaaacaaacagaaacacaaacaatttggatcaaaaggagaaatgataagtgacaaaagcagcacaaggaatttccctgtgtggatgctgagctgtgatggcgggcactgggtacccaagtgaaggttcccgaggacatgagtctgtaggagcaagggcacaaactgcagctgtgagtgcgtgtgtgtgatttggtgtaggtaggtctgtttgccacttgatggggcctgggtttgttcctggggctggaatgctgggtatgctctgtgacaaggctacgctgacaatcagttaaacacaccggagaagaaccatttacatgcaccttatatttctgtgtacacatctattctcaaagctaaagggtatgaaagtgcctgccttgtttatagccacttgtgagtaaaaatttttttgcattttcacaaattatactttatataaggcattccacacctaagaactagttttgggaaatgtagccctgggtttaatgtcaaatcaaggcaaaaggaattaaataatgtacttttggctaaaaaaaaaaaaaaaaaaaaaaaaaaaaaa

SEQ ID NO: 33 - DNA, 4909 bp, Homo sapiens
gcggccctgcccccggcacggcccccaggtgcgctccttctccggctgcttgtagcactggtctcactgtccccgccgtcagccaccggttccttatccgtctcattccccattgtggcttggctgagccggtcgccaggcctcgctgtcctcctttgccttcctctctcctcagcggccgtactttgcgccgtacctcacctggcctgcaggatgaagaaccccatgctggaggtggtgtctttactactggagaagctgctcctcatctccaacttcacgctctttagttcgggcgccgcgggcgaagacaaagggaggaacagtttttatgaaaccagctctttccaccgaggcgacgtgctggaggtgccccggacccacctgacccactatggcatctacctaggagacaaccgtgttgcccacatgatgcccgacatcctgttggccctgacagacgacatggggcgcacgcagaaggtggtctccaacaagcgtctcatcctgggcgttattgtcaaagtggccagcatccgcgtggacacagtggaggacttcgcctacggagctaacatcctggtcaatcacctggacgagtccctccagaaaaaggcactgctcaacgaggaggtggcgcggagggctgaaaagctgctgggctttaccccctacagcctgctgtggaacaactgcgagcacttcgtgacctactgcagatatggcaccccgatcagtccccagtccgacaagttttgtgagactgtgaagataattattcgtgatcagagaagtgttcttgcttcagcagtcttgggattggcgtctatagtctgtacgggcttggtatcatacactacccttcctgcaatttttattccattcttcctatggatggctggctaacttcatacccccatgtcagtgtgtgtattctgtatgtaaatatgtttatatttatagagcatcaatcaatataagcattattgagaaaaatgtgacccgtaacactgtgttctggataaaaatgtgattaggaatcacgcaaagtgcttactgtgtaagcccaagaacaaaggctttctgaatcttctcaggcagttcagatttaaagcaccatccaaaccttggaaatacgacagggtgtggtagaattcagcaatatgagaaaaccagcccctaaaatgatagccacaagagattaattgtgtttttttttctcctgtaatccttgtactgttcggctgaatttgaagattggaagacttatattgagaccagtaactttactgtaaatttactttgtttcattgaaaaaacaaattgataaacatattaaactggaagaattttctttattcaaatgaaaacatgtttgatgactggtcaaaaaataagctcataatctatttttttcatgtagtatataagtcaagaatgttttattgtcattatgtgaaaccaatattggcaaatagtactttaatgatgaagtaaatgaccagaaattatagaaatctgtgttttcctgtaaaaatagcactatagtatcacttgaacaatttgatttggctttacttactaggaagcctggaattcattatttttttccttttatgtgccactgtggctactttaaatcactctgagaggtaaatggatataggattgaagttatgtgggtatttggcatgtgtgtgtgaaataaatatgtagatagtcacatatacacagactgagagataaattgttcttgattgctttattatcatcatactagtgtgttcattatagagtatctgtagaggtgaatgtaaaagtaagtccaatctattttcttatgtcattgaatttgtagtgttaacttgcatatatgttattggatgggttgtcttttaaagcatttactaatgtactctgaaatttttaaaagccttcagatttgttttctagtcacttttttccatatcatttctaattatagtttatatccttaaaagaaggatgccacagtagtatgtaaaacccaaacaagtagaacccaagcaaataaaattatttaaaataattttaaagtggcttagtactgccagtcatgtaaattgattctgctgagggtcttataagaattgagatataacaatggtaaaacaagcattcaagcacttttacaaaattaccaaattcttaaaatgaagccacagctagacttgcatttcaggtattaaaattgctttcttaactgtcaagaatcacaaaataacaaatcatattatgagtgaatatggggagggcggggccaatcagtcaatgataatctgaacaaattttaagagcagattttagattaataatgttttatcaccactaatttgcccacaacaaactcagtatttaatttttcaaattaaatattaaattatttaagtattttaaataattaaaacattaaatggcaacaccatagaatataggtgttctctggacctattctaaccacttaaaattatcttaagtatgcatacataaaagcaaccactatgagaactaccgtgttagtggtttttcacttactgtatattacccttgtaggaatagtttaaggaaattcatttcttaaaaatatagtgtcctcaaataattaatttttttgcaaactttagttattacaggcagcaaaaaccactgtctgaaactaaatctgtgttcaaagatgaagacccctcattaaaagccaaggacgttcttaagattggaactgacataattagtcttgacttacttcattaaagcaagattcaattccttgttcatttgagtgttcattatatgccaggcattgaccagttgcaattttatggtccagaattaatattattattcgtaaactagctataatagagtatatacagtgctgtgggaatacaggggaagaagcaattaaatctgctagaagggtaagagaaatctgtatgcaggaggcaatgctagcattaagccaagaaatagtgtgaggtgatcttatcacactgatgtgttcaactgtttatgggaaaaggaaactaggatggttttatttgtgaaatgttctacaacgctagaactgttgaacttcttgggagaaaaggagaatctttgttttgttgtgctgagtttgattagttgcttaaccaagtagaaagaaaagcacatcttcctgatcacagttataaaagaaaccctgaggccgggcgcggtggctcaagcctgtaaccccagcactttgggaggccaaggagggaggatcacaaggtcaggagatcgagaccatcctggctaacacggtgaaaccccatctctactaaaaatacaaaattagctgggcgtggtggccggcgcctgtagtcccagctactcatgaggttgaggcaggagaatggcgtgaaccgaggaggcggagcttgcagtgagtggaaattgcgccactgcactccagcctgggcaacaaagtgagactccatctcaaaaaaaaaaaaaaaaaaaaaaaaaaaaaaagaagaagaaaccctgagccattaatgtgtctcgtaacttgaggaagttcatgaattctctgggcttcatccattaagattcatccttatgctcctgcaagtttcttatatttatgtatttctattctgatttctgaaatgataacctagtagtgtctgatgaagttttttcatgcttattttattctttgtcacagatgaaagaagaataggactaattggggctaagatgaattaatgtaagtgtcagatactaggcaggtgttagggatgaaatgatgaatgaggcatggacctgttcctcagagtttatggcccagtagacataattgtattaggactttctgcagttgacatttgcataaagctgactgactgaaggaacagaaagtgagacagacagatatgaccaaatttatacaaaccatgtaccaacacttgaaagatgggtggatattttccaggaaacagattttgggcaggacattccatgcactggaaatagcatgaacaaatgcatgaaaattgcctacaacatgcctggcacatagctgtgaggtaccctatgagttgttgacttgaaaacatggaactgcacagggcattcaggcaagtgcaagtggttcaggggccagcgcagagcagagtgctgagtaaagatgtcagaaaaggaaagcaatggtctggtacaagtcttgtatagaacaagaagtttagacttttgaacaggcaatcgagatttggggttcagaaagataaatcccaaaagtatggagaacaaaggaactcattttaaaggactagctaagatgctcaatctctaaaaaaaaaaggatctgtattcgtgagagtagagagaaaggttgtttaggaagagtcaacagactttagcaaaatccttttatttgattcatgcataactcctgatggagtgtcaaggaagactcattcacttttctttcctgccagaaagttggttcttgcaaaatagattaacttgatgactatgtgtatattggatactcctaattttagctctgttagatatgtttctttctaaggacaagcaactatgtatagacttgttgtttgaattttttttcagtatatatatgtttcttgtttttctatttttctacttcatactgttaatgtcaaatatcaaaaatgttttccagcaatatcaagttatggcaatggcaaaagtccttgttgtagatgagaagcatataagaaatggttgccaatctttgttttgtatgatctatttagagttttaaccaacctagatctgtcagctaagctaattttatatttggtatacatgcatgtcaaataaagttaattttacatacaaaaaaaaaaaaaaaaaaaaa

SEQ ID NO: 34 - DNA, 3683 bp, Homo sapiens
ggcggagctaggggcgggcccctgcgtctctgggcgctggagcgcggcgactatcacgccgcgtggcggacggacggactgacggacgcgcagccttacccgaaaggccatggcggagcacgcccctcgccgctgctgcctgggctgggacttcagcacgcagcaggtaaaggttgttgctgttgatgcagagttgaatgtcttctatgaggaaagtgtgcattttgacagagatcttccagaatttgggactcagggcggtgttcatgtgcacaaggatgggctgacggtcacttctccagtactaatgtgggtccaggcactggatatcatcttggagaagatgaaggcttcgggcttcgacttctctcaagtcctagccttgtccggggcgggccagcaacacggaagtatatactggaaggctggagcccagcaggcactgacaagcttatcaccagacctccggctacaccagcagctgcaggactgtttctccatcagcgactgcccggtgtggatggactccagcaccacagcccagtgccgccagctggaggctgctgtgggtggtgctcaggctctcagctgcctcacggggtcccgtgcctatgagcgttttacagggaaccaaattgcaaaaatttaccagcagaaccccgaggcctactcacatacggagagaatttctttggtcagtagctttgctgcttccctgttccttggctcttactcccctattgactacagtgatggttctggaatgaatttgttgcagatacaggataaagtctggtcccaggcttgccttggtgcctgtgcacctcatttagaggagaagcttagcccaccagtaccatcatgctcagttgtgggagccatttcttcctactacgtccagcgctacggatttcctccaggatgcaaagtggtggccttcactggggacaacccagcgtcgctggcaggcatgagactggaggaaggtgacattgcggtcagcctgggcaccagtgacaccctgtttctctggctccaagagcccatgcctgccctggaaggccacatcttctgcaacccggttgactcccagcactacatggcactcctgtgctttaaaaatggctccctcatgagagagaagatccgcaacgagtctgtatcccgttcctggagcgatttctctaaggcactgcagtccacagagatgggcaacggtggaaacctgggtttttattttgatgtaatggagatcacccctgaaattattggacgtcataggtttaacacagaaaaccacaaggttgcagcattccctggggatgtggaggttcgagcactaattgaaggacaattcatggccaagaggattcacgcagaaggcctgggctatcgagtcatgtccaagacaaagattttggccacaggaggagcatctcacaatagagaaatcttacaggtgcttgcagatgtgtttgatgccccggtgtatgttatagacactgccaactcggcctgtgtgggttctgcataccgagcttttcatggtcttgcaggtggaacagatgtgcccttttcagaggttgtgaagttagctccaaatcccagactagctgctaccccaagcccgggagcttctcaggtctacgaggcccttctcccccagtatgccaaactcgagcagagaatcttgtctcagacccgggggcctccggagtgaacaggcatccctgttgcccctgcctgcccagatttactgaccccatttgtcgacatggccccagacaggagggatccacttctctgttctgaacagctcttcctgcccctactgactccttggagtgtccaggaccatcttaaagccgccctcagcacatctgcatgaagatagataggcactcctgtccctgtgcccgtgtgccccagggcaggaaagcatctctcttttcctgtcttttatcccaggaggcaggacaacactgagactgggatatgtccaataaaaactatgacttttccccttgcagaggcagaattaaagctaatctagggactcaaatcagcagaatgggggagacaaagcccggtctcaccccctaacctcatcctatctctttctccaaccctgactgcccactcctccacaaaccgtgacccatagccgcccccaccccataccttgatctaccatccatcctcttccccaatccaaaccccacagtctcttctctcccacaccctgccctccttgtttcagctgtctgaggtgcctcgcagggcctctcttacttgccccatgctcaccctttccatgctgtccccattctctcctttcaccatctctcctctccccctccttcatctctcctccctccccaaactcacttggcataattcacaacctcccacccaaacaatgggcctggtggacgtgcttcctgtgccctccctttagctatgcccacagatcactgagagggaccatctcccaagtggtgcagtttagaacttctctccctttttctccctcattccctctctcttcttgcagtccacttgctgaagaagttgtgtcatttctctggaagaatttccaaaattctggatttcttttttattttggagtatttcatcagctgaaaagtgattctcactttgagttttcttcctatatttgtatagtgagttcctttttccttcctctttatccctcctgttttactttatacctctctattccttgctcaaattattgcaaaagcctctatagaaagtcctctgtgatctgactcctgcagactcttccagatttttctgcccaaggcctttactgagctcaggactccagctaaatcaaaatacgcatgttctcacccagagtgacaaaatcctgcagataggtttaagacctagtggctcagagcagtagctactgggaagttaaaaggaaggggcttagaaaatgaatgggaccaaaggcatcacttctgatggagatgaagccatcttgaaagtgagtggtgtcctttggaggcatggtggatgaaaggcgcaaaggaagcaagaggttaaagataatggcccattagatacaacagcaagcccaagattccgaagaagacagacaactccccctagtaccacctagacattactttttaaagacattttacattattgtccagcagaaaaaggctgtcttggaccatgaaacagtaaactgtaactaaacacttcaacatgaatttgaaaataaataattgtggatataaaagaacaccagagatcagaaattcaaaaactcagaataaaaatgaaaaagctacaagcatatatgagaagagaactgactgaacttgggaaataatttgaacaaaaagataaatcttcacagatatgaatactaaattatatcttaatgaaaatagatatggtcacaagtacattaaggcacgtagaaggtaggagtaagaaaagctaagagaagcaaaacaaacaaagcaatattaaaggaagagccaaaaagacccagaaataaaatgacagataaagaagattgtcaaagaaaagatgatacaggtaagattggaactcatgaagacaaaagataagacagtggcatagagttaatatttaaaattcaaatattaaaactcaaataaaccccaaagaacttttgg

SEQ ID NO: 35 - DNA, 3588 bp, Homo sapiens
gcagcagcagagaatccaaaccctaaagctgatatcacaaagtaccatttctccaagttgggggctcagaggggagtcatcatgagcgatgttaccattgtgaaagaaggttgggttcagaagaggggagaatatataaaaaactggaggccaagatacttccttttgaagacagatggctcattcataggatataaagagaaacctcaagatgtggatttaccttatcccctcaacaacttttcagtggcaaaatgccagttaatgaaaacagaacgaccaaagccaaacacatttataatcagatgtctccagtggactactgttatagagagaacatttcatgtagatactccagaggaaagggaagaatggacagaagctatccaggctgtagcagacagactgcagaggcaagaagaggagagaatgaattgtagtccaacttcacaaattgataatataggagaggaagagatggatgcctctacaacccatcataaaagaaagacaatgaatgattttgactatttgaaactactaggtaaaggcacttttgggaaagttattttggttcgagagaaggcaagtggaaaatactatgctatgaagattctgaagaaagaagtcattattgcaaaggatgaagtggcacacactctaactgaaagcagagtattaaagaacactagacatccctttttaacatccttgaaatattccttccagacaaaagaccgtttgtgttttgtgatggaatatgttaatgggggcgagctgtttttccatttgtcgagagagcgggtgttctctgaggaccgcacacgtttctatggtgcagaaattgtctctgccttggactatctacattccggaaagattgtgtaccgtgatctcaagttggagaatctaatgctggacaaagatggccacataaaaattacagattttggactttgcaaagaagggatcacagatgcagccaccatgaagacattctgtggcactccagaatatctggcaccagaggtgttagaagataatgactatggccgagcagtagactggtggggcctaggggttgtcatgtatgaaatgatgtgtgggaggttacctttctacaaccaggaccatgagaaactttttgaattaatattaatggaagacattaaatttcctcgaacactctcttcagatgcaaaatcattgctttcagggctcttgataaaggatccaaataaacgccttggtggaggaccagatgatgcaaaagaaattatgagacacagtttcttctctggagtaaactggcaagatgtatatgataaaaagcttgtacctccttttaaacctcaagtaacatctgagacagatactagatattttgatgaagaatttacagctcagactattacaataacaccacctgaaaaatatgatgaggatggtatggactgcatggacaatgagaggcggccgcatttccctcaattttcctactctgcaagtggacgagaataagtctctttcattctgctacttcactgtcatcttcaatttattactgaaaatgattcctggacatcaccagtcctagctcttacacatagcaggggcaccttccgacatcccagaccagccaagggtcctcacccctcgccacctttcaccctcatgaaaacacacatacacgcaaatacactccagtttttgtttttgcatgaaattgtatctcagtctaaggtctcatgctgttgctgctactgtcttactattatagcaactttaagaagtaattttccaacctttggaagtcatgagcccaccattgttcatttgtgcaccaattatcatcttttgatcttttagtttttccctcagtgaaggctaaatgagatacactgattctaggtacattttttaactttctagaagagaaaaactaactagactaagaagatttagtttataaattcagaacaagcaattgtggaagggtggtggcgtgcatatgtaaagcacatcagatccgtgcgtgaagtaggcatatatcactaagctgtggctggaattgattaggaagcatttggtagaaggactgaacaactgttgggatatatatatatatatataattttttttttttaaattcctggtggatactgtagaagaagcccatatcacatgtggatgtcgagacttcacgggcaatcatgagcaagtgaacactgttctaccaagaactgaaggcatatgcacagtcaaggtcacttaaagggtcttatgaaacaatttgagccagagagcatctttcccctgtgcttggaaaccttttttccttcttgacatttatcacctctgatggctgaagaatgtagacaggtataatgatactgcttttcaccaaaatttctacaccaaggtaaacaggtgtttgccttatttaattttttactttcagttctacgtgaattagctttttctcagatgttgaaactttgaatgtccttttatgattttgtttatattgcagtagtatttattttttagtgatgagaattgtatgtcatgttagcaaacgcagctccaacttatataaaatagacttactgcagttacttttgacccatgtgcaaggattgtacacgctgatgagaatcatgcactttttctcctctgttaaaaaaaatgataaggctctgaaatggaatatattggttagaatttggctttgggagaagagatgctgccatttaaccccttggtactgaaaatgagaaaatccccaactatgcatgccaaggggttaatgaaacaaatagctgttgacgtttgctcatttaagaatttgaaacgttatgatgacctggcaacaaaaagtaatgaagaaaattgagacctgagtgaagataagaaatgatctttacgtggcaaaatgaacacatcttgagtatttaggaaatgggcagtgaaggctaagaacctggtgtgtttcttgggatcatggtacatttatcactgaattaagccatcagggaaaaaacaacaaaaaaagagaacacctccagcttttctttttctgtatatactcatgtcccccagattccaacatttctcactgaaagggggcatgtatgcaaacctcatctttctccttcattaatgatgatcttcagattaaaccctttggtgctaggagctgacaatttccaaagcagcctgtgaagtcctaggggctgggggccactcttgcggcaagcagaaggccatcctactccgcggagtgatcatggaaatgtattttagttaaactctgacagctcccaaacggaagactacagcatgacgtagtattatgattgcattgtatgaaagagcaagtgactttctaagtaggatgaatcatattcatatgcagatgtcttagcctcttgacgctggaagtgtggatttatagctatgaaaccactgctggcagtgggtgggccactgggactgacgggggttaaagggcattttactaaggcagctaagacatattcagacatcaacgttatccttctttttcatatttctacctgagtgaag

SEQ ID NO: 36 - DNA, 1483 bp, Homo sapiens
gacacagtagaaataacactttataagcctcttcctcctcccatctcctggcctccttccatcctcctctgcccagactccgcccctcccagacggtcctcacttctcttttccctagactgcagccagcggagcccgcagccggcccgagccaggaacccaggtccggagcctcaacttcaggatgttgacaacattgctgccgatactgctgctgtctggctgggccttttgtagccaagacgcctcagatggcctccaaagacttcatatgctccagatctcctacttccgcgacccctatcacgtgtggtaccagggcaacgcgtcgctggggggacacctaacgcacgtgctggaaggcccagacaccaacaccacgatcattcagctgcagcccttgcaggagcccgagagctgggcgcgcacgcagagtggcctgcagtcctacctgctccagttccacggcctcgtgcgcctggtgcaccaggagcggaccttggcctttcctctgaccatccgctgcttcctgggctgtgagctgcctcccgagggctctagagcccatgtcttcttcgaagtggctgtgaatgggagctcctttgtgagtttccggccggagagagccttgtggcaggcagacacccaggtcacctccggagtggtcaccttcaccctgcagcagctcaatgcctacaaccgcactcggtatgaactgcgggaattcctggaggacacctgtgtgcagtatgtgcagaaacatatttccgcggaaaacacgaaagggagccaaacaagccgctcctacacttcgctggtcctgggcgtcctggtgggcagtttcatcattgctggtgtggctgtaggcatcttcctgtgcacaggtggacggcgatgttaattactctccagccccctcagaaggggctggattgatggaggctggcaagggaaagtttcagctcactgtgaagccagactccccaactgaaacaccagaaggtttggagtgacagctcctttcttctcccacatctgcccactgaagatttgagggaggggagatggagaggagaggtggacaaagtacttggtttgctaagaacctaagaacgtgtatgctttgctgaattagtctgataagtgaatgtttatctatctttgtggaaaacagataatggagttggggcaggaagcctatggcccatcctccaaagacagacagaatcacctgaggcgttcaaaagatataaccaaataaacaagtcatccacaatcaaaatacaacattcaatacttccaggtgtgtcagacttgggatgggacgctgatataatagggtagaaagaagtaacacgaagaagtggtggaaatgtaaaatccaagtcatatggcagtgatcaattattaatcaattaataatattaataaatttcttatatttaaggcaaaaaaaaaataaaaaaaaaaaaaaaaaaaaaaa

SEQ ID NO: 37 - DNA, 4941 bp, Homo sapiens
gccataaagaatgctgatgggagaaccattttcctaattttcaaattgttgagctgtttgccataatggatgatcagcaagctttgaactcaatcatgcaagatttggctgtccttcataaggccagtcgaccagcattatccttgcaggaaaccagaaaagcaaaatcttcatcaccaaaaaaacagaatgatgtccgagtcaaatttgaacatagaggagaaaaaagaatccttcagttccccagaccagttaaactggaagatctgagatctaaagctaaaattgcctttggacagtctatggatctacattataccaataacgagttggtaattccattaactactcaagatgacttggacaaagctgtggaactgctggatcgtagtattcatatgaagagcctcaagatattacttgtaataaatggaagtacacaggctactaatttagaaccattgccatcactagaagatttggataatacagtatttggagcagagaggaaaaaacggctatctataataggtcctactagtagagatagaagttctcctcccccaggttacattccagatgaattacaccaggttgcccggaatgggtcattcactagtatcaacagtgaaggagagttcattccagagagcatggaccaaatgctggatccattatctttaagcagccctgaaaattctggctcaggaagttgtccatcacttgatagtcctttggatggagagagctatccaaaatcacgaatgcctagggctcagagctacccagataatcatcaggaattttcagactatgataaccctatctttgagaaatttggaaaaggaggaacatatccaagaaggtatcatgtttcatatcatcatcaagagtataatgatggtcgtaaaacttttccaagagctagaaggacccaggggaccagcttacggtctcctgtgagtttcagtcctactgatcattccttaagcactagtagtggaagcagtatctttaccccagagtatgatgatagtcgaataagaagaaggggaagtgacatagacaatcctactttgaccgtaatggacatcagcccacccagccgttcacctcgagctccgaccaactggagattgggcaaactgcttggccaaggagcctttggaagggtctacctctgttatgatgttgatacaggaagagaattggctgttaagcaagttcaatttgaccccgatagtcctgagaccagcaaggaagtaaatgcacttgagtgtgaaattcagttgctgaaaaacttgctacatgagcgaattgttcagtattatggctgtttgagggatccccaggaaaaaacactttccatatttatggaatatatgccagggggttcaattaaggaccaattaaaagcatatggcgctcttactgagaatgtgactaggaaatacacccgtcagattctggagggtgtccattatttgcacagtaatatgattgtccatagagatatcaaaggcgcaaatatcctgcgagattcaacaggcaacgtcaaactaggagattttggggccagcaaacggcttcagaccatctgtctctcagggacaggaatgaagtctgtcacgggcacaccatactggatgagccctgaagtcatcagtggagaaggctatggaagaaaagcagacatctggagtgttgcatgtactgtggtagaaatgctaactgaaaagccgccttgggctgaatttgaagcaatggctgccatctttaaaatcgccactcagccaacaaacccaaagctgccacctcatgtctcagactatactcgagatttcctcaaacggatttttgtagaggccaaactgagaccttcagctgatgaactcttaaggcacatgtttgtgcattatcactagcagccagtaacctctcctgtgcctctacctagctcccatctattcattcaccttctctctgactgcacttttcttttttataaaaaaagagagatgggggagaaaaaagacaagagggaaagtatttctcttgattcttggttaaatttgtttaataataataatatcctaaattttttatatttaatctttttttcccttacaagaacttgaagtttttttttttaatttttataatgtactgatgtggttcagagagataaagcactttagtacatagtcactctttttagtacaaacaaatcatttggaatacctaaagattgtagagtcattccctctatcactgacacatcagtgacgatgggaagacatggaaaacaaggagaagaaaatgatgtataatttgtagtttttagtgatagtatttaaaatatatcctcatttgtggggttgagccctaaactttagtttagggtaggtactcaacttaaagaatataggtttcttcttatatctgtattctttagatcctaacctctgtctaccaacctttttgctcagtaggagtcttgatagaagatatgaatctctgagaggtatgtttatttgttaatcctaaccagtataataagcaaatacactataatagatccacgttactggaatctgtaaaccttgagggatagctttctgcttaaaaacacacacacacacacacacacacacacggaaaacctttattttaaagtcaagttgtgagcaaatagaaataaaagacaaaaggacatcactcttatcaaatgtgtgagcagtagaagagaccacatttacagtcaatagaaataatgaaaaaaaattaggtgtttagtgtattttaaacagttttgttttgttttacttgagggggacgtcccaaaattaaaggaatggagaaataatcaaaatcatgtataccatcttctatttccagctcctgattccccataggtaacatcccttaggagcgaagagttcaattagtaatgtttatgtgttatgtcaggagatgaaacccttgttcttaggatcacagaatactaaagcacctcaaaaaaacaggtatcatgtgaaacagtggttgccaaaagtggagcgaggatgatttcactaggcatttggcaattcttagagacatttccggttgtcacaattggagggatactagtaacatgaattgggtagaggccagggatgttgctaaatagattataatacacaaggaaagcagcctcaaagaattacccctcccaaaatgtcagaagtgctgaggctgagaaaccctgatgtaaagatcagtcccagttataaactgaaaacagctatttacaaagcagtaaatgcaagaaagaaaaggaagtcgcaaagagaaagtgatgtaatgcaaattgaggattttacaagatcagatactgctgctttaagtcaagggtgaataatctcaacaaacagcaaatagcaatcactttaccagctgcatattgcacccacataggtaactcttcattttaggaacaaactgaatttgaacactgagccttttgaactcagccatctctatatattctttccttaaaattcatgattttgggcaaaaaaaaaaaaaaaagcatatcaaaacaaaattttaactactaatgggaaggttaaaaagctgccacgtatttctagtacaatgtatccaataagagcaaggacattgttaaatggaacaagacagctgggaaaggccccactatctctaatagaattgtgctactataaaacatgaagatatcagcaatttggccacttgcagtttttttcagcatgttaaagcaagtgctaagtactttattagtactttatttagtactttattttaaaggtctagaaaacaacagtcttcctggaggccccagaatccctttcatgggattcataagggactcaggtattcttattttctgccaaaaggtgtgcttatttagggactcttttacgatactttgtttctgaagttaggtagatcttggtttactgtgccaaggtcctacctagcattccctgtaggaatatttgaaattccactagctagtctaagaagtcaaagcacaaaattaattgtcaacgcttctctcatattcttaaaattgaagcagtttgcagggaagaacaagaatgaggtgtccctgccttggtaaagcaactgccaaattttgttctagaaagaatccccaagtgtgtggatctattataatttctttatcttttatgaatgagggcatcttttctacttgagcaagatcatggtccttgaccagtgggcttttccttcatatctgtcttgtgtagttgtgcttttcctttggctcgtttttggtctgtcagggtaaccagcagtgcacaatatgagacaaatgctctttagagagaaatctggtgagactgtagaacccagagcaaaactgtttttttttcagtctctgttttcttttctaaatgctatagaaaataaaggcacctgaaaagaaactactactttaacactgctgtggaaggcctttgctttataagaaaaatattattagctatgggaaagtaatgttctttatgtaaagacttaaaaatagactaatagtttacagagttattatataaaatacgatgtgaatttatttcaaacaagttgtgaaggtaccaaaaaccacaataaaagttaatatatataaaaactactagaacaaaaaagcttgaaggtgtgggggtggagggtatggaagaccaaaagtaaatttaaaaaagaaatttttgaaaggaaacagctttatcaggggaagttaaatataacactccgtttttttcttctttctaataatgatatggatcaacaaatgcaatttgaactttttaagataactctaaatgtgttttgtttcttaaatgcacaattgattcttctatactgtaatgcttctttgctgacgctggaaaatgg

SEQ ID NO: 38 - DNA, 4344 bp, Homo sapiens
gggatgccgaggagccggggcggccgcgccgcgccggggccgccgccgccgccgccgccgccgggccaggccccgcgctggagccgctggcgggtccctgggcggctgctgctgctgctgctgcccgcgctctgctgcctcccgggcgccgcgcgggcggcggcggcggcggcgggggcagggaaccgggcagcggtggcggtggcggtggcgcgggcggacgaggcggaggcgcccttcgccgggcagaactggttaaagtcctatggctatctgcttccctatgactcacgggcatctgcgctgcactcagcgaaggccttgcagtcggcagtctccactatgcagcagttttacgggatcccggtcaccggtgtgttggatcagacaacgatcgagtggatgaagaaaccccgatgtggtgtccctgatcacccccacttaagccgtaggcggagaaacaagcgctatgccctgactggacagaagtggaggcaaaaacacatcacctacagcattcacaactataccccaaaagtgggtgagctagacacgcggaaagctattcgccaggctttcgatgtgtggcagaaggtgaccccactgacctttgaagaggtgccataccatgagatcaaaagtgaccggaaggaggcagacatcatgatcttttttgcttctggtttccatggcgacagctccccatttgatggagaagggggattcctggcccatgcctacttccctggcccagggattggaggagacacccactttgactccgatgagccatggacgctaggaaatgccaaccatgacgggaacgacctcttcctggtggctgtgcatgagctgggccacgcgctgggactggagcactccagcgaccccagcgccatcatggcgcccttctaccagtacatggagacgcacaacttcaagctgccccaggacgatctccagggcatccagaagatctatggacccccagccgagcctctggagcccacaaggccactccctacactccccgtccgcaggatccactcaccatcggagaggaaacacgagcgccagcccaggccccctcggccgcccctcggggaccggccatccacaccaggcaccaaacccaacatctgtgacggcaacttcaacacagtggccctcttccggggcgagatgtttgtctttaaggatcgctggttctggcgtctgcgcaataaccgagtgcaggagggctaccccatgcagatcgagcagttctggaagggcctgcctgcccgcatcgacgcagcctatgaaagggccgatgggagatttgtcttcttcaaaggtgacaagtattgggtgtttaaggaggtgacggtggagcctgggtacccccacagcctgggggagctgggcagctgtttgccccgtgaaggcattgacacagctctgcgctgggaacctgtgggcaagacctactttttcaaaggcgagcggtactggcgctacagcgaggagcggcgggccacggaccctggctaccctaagcccatcaccgtgtggaagggcatcccacaggctccccaaggagccttcatcagcaaggaaggatattacacctatttctacaagggccgggactactggaagtttgacaaccagaaactgagcgtggagccaggctacccgcgcaacatcctgcgtgactggatgggctgcaaccagaaggaggtggagcggcggaaggagcggcggctgccccaggacgacgtggacatcatggtgaccatcaacgatgtgccgggctccgtgaacgccgtggccgtggtcatcccctgcatcctgtccctctgcatcctggtgctggtctacaccatcttccagttcaagaacaagacaggccctcagcctgtcacctactataagcggccagtccaggaatgggtgtgagcagcccagagccctctctatccacttggtctggccagccaggcccttcctcaccagggtctgaggggcagctctggccagtgctcaccagggccagcagggccctaggctggggtcgtacagctgaagtggtgggtgcattggcctaggctgagcgtggggcagggaattatgggggctgtgccccagggtgggtgtctggcacccagctgccagccttctgtcctgggcaaactactccctacttaagggaataggccaggctccatccggaggcagggaccatgccaggaggagcccctgtggtcacggcatcctgtggtgtccatgaggtaccacagctccactcctggctggaacccagcaccctctgtgggaagccagcactagctctcatcccccatccgggagataccaccagtcctggtccccttttgccaacacctgctggtcagatgtccccctacccccaccccactgtcctccaaggctacaggacccctgcttctgacacagtgagcaacaagcctgggtttccctgctggcagacggcagatccctcaggaaacctgctccacttgtcagggtctcttcggagacccaggatttagggtcacatgctgcaggcagggctgtggcccagctgggtctgacaaggacccagctgtcacatcgtgaatatttaaatgtcctgtcactactgtcccattttgcaaaggctgcttgaggctttaggtgaactagaggtgactgtcttggtgatgaggccagcatagcggccctcccccaggcgacaaggaccaaggtgctgctaaggccactctagcgcccagacaccccagtagctgagctctgctcctatggctacagagctggggcagaagctgaccccatttctggaggaagatccgagtttgtgaccgtcctccactcccctctattgtcactgtccccagctttgctccagtctgtcacttgcagcctggagctcagcctcaccagttaggtgaggcagagatggctgcagggccaacactggcagagcctgggagtccttcggaaggggaccagggcgtctgaagtgctcagtgcccccactactctgaggccgactccagctactctgaggccgactcaatctctcggctggaagcagtgttttcccagagcttggcccttgctgacctcgctcactgggcccatcttcccacactgctcttagaaggacacccctaccggtagcagccccaagctgagggggctccctttttgaccttcactggcccgcccttcactgtctccagcaggagttcctagggcttggcctgccttgctccacagtacggcggaggcagccctgcttgtcactgaggagccctagacaaggccaatgggttcatcaatgcccactggctctctgccaaagccaaaaaggtgtcaggcagtctccagcgtgctggccgggtctcggatgccacccctgctcactgagcctgcatgggccttgcccccgaccctgtggtctctgggattggggtcggcttaccctgtagcacagacagggactcctgctgccctgggagctgtctcaagcaaaatctcttgtcccagaggtgcccatgtgggtccgctgtgtcccctgtcatcatccttgttttttctcattttggccaagggcaggctccctgggacaggcagggaacaactgcggagatattagtgattcataggtttgtacagtgttttatactttgcaaagcactttattagctcacacctgtccactcacatgaaactcgtgttaggccctgggaggccgacggtaactctcaccgtgccctcagatgaagcacagagaggttgttacttgcccgggccatccagtgggctggctgggtcttgtgtccccatctgtggacccctctagggtctgagatgagatgagaagtgtctcctgtatccacctcttcctggcctcccttcccccacttcctggtccctgtccactcctcaggttggtgctctcacttcttgaaagctctaggcacccccgcctcccgccaggctccccattggctcctggcaggccagctgagaatgaacaggagatggaggcaggcagcccaggctgcagaggtgagggatgtggggccaggcccagagggctcagcctagaggcttccaatctcagattctcctgcctgtggtcatctgtttgtccatcaccccaggacagggcagacagaggggcaaagcactgggggccccagagcctagcttcccctcagcctgggggacatcacagcatttcagtgtcagtcacattttaaactgatcagcctttgtataatgttttttaaatcatttctaaataaaacagaaatacagagtgaaaaaaaaaaa

SEQ ID NO: 39 - DNA, 4941 bp, Homo sapiens
aaccacgatgtctttggcacagcctctcatctgtcagatgggagcggggaccccggagagggagtcagccgaggtcctggcattccttgtgaacccccgtctgtgggtttctggtccagtgtcccttctccagattagatggcttaggcctcctctaagggggtgggcgtgcacatccggagagctgtctggtgtgcaggactgggctgcaggttaccctgaactgcaaccatcttagagcaaggcccagcttgcagcaggaggagctgcaggccgcccaccctagccacggcccctgccctggcaggaagcttccaagagtaaacactgcctaatcgtcccgcccagtagtgagcaggcctgtcccattccatactgaccagattcccagtcaccaaggccccctctcactccgctccactcctcgggctggctctcctgaggatgcaccagcgtcacccccgggcaagatgccctcccctctgtgtggccggaatccttgcctgtggctttctcctgggctgctggggaccctcccatttccagcagagttgtcttcaggctttggagccacaggccgtgtcttcttacttgagccctggtgctcccttaaaaggccgccctccttcccctggcttccagaggcagaggcagaggcagaggcgggctgcaggcggcatcctacacctggagctgctggtggccgtgggccccgatgtcttccaggctcaccaggaggacacagagcgctatgtgctcaccaacctcaacatcggggcagaactgcttcgggacccgtccctgggggctcagtttcgggtgcacctggtgaagatggtcattctgacagagcctgagggtgccccaaatatcacagccaacctcacctcgtccctgctgagcgtctgtgggtggagccagaccatcaaccctgaggacgacacggatcctggccatgctgacctggtcctctatatcactaggtttgacctggagttgcctgatggtaaccggcaggtgcggggcgtcacccagctgggcggtgcctgctccccaacctggagctgcctcattaccgaggacactggcttcgacctgggagtcaccattgcccatgagattgggcacagcttcggcctggagcacgacggcgcgcccggcagcggctgcggccccagcggacacgtgatggcttcggacggcgccgcgccccgcgccggcctcgcctggtccccctgcagccgccggcagctgctgagcctgctcagcgcaggacgggcgcgctgcgtgtgggacccgccgcggcctcaacccgggtccgcggggcacccgccggatgcgcagcctggcctctactacagcgccaacgagcagtgccgcgtggccttcggccccaaggctgtcgcctgcaccttcgccagggagcacctggatatgtgccaggccctctcctgccacacagacccgctggaccaaagcagctgcagccgcctcctcgttcctctcctggatgggacagaatgtggcgtggagaagtggtgctccaagggtcgctgccgctccctggtggagctgacccccatagcagcagtgcatgggcgctggtctagctggggtccccgaagtccttgctcccgctcctgcggaggaggtgtggtcaccaggaggcggcagtgcaacaaccccagacctgcctttggggggcgtgcatgtgttggtgctgacctccaggccgagatgtgcaacactcaggcctgcgagaagacccagctggagttcatgtcgcaacagtgcgccaggaccgacggccagccgctgcgctcctcccctggcggcgcctccttctaccactggggtgctgctgtaccacacagccaaggggatgctctgtgcagacacatgtgccgggccattggcgagagcttcatcatgaagcgtggagacagcttcctcgatgggacccggtgtatgccaagtggcccccgggaggacgggaccctgagcctgtgtgtgtcgggcagctgcaggacatttggctgtgatggtaggatggactcccagcaggtatgggacaggtgccaggtgtgtggtggggacaacagcacgtgcagcccacggaagggctctttcacagctggcagagcgagagaatatgtcacatttctgacagttacccccaacctgaccagtgtctacattgccaaccacaggcctctcttcacacacttggcggtgaggatcggagggcgctatgtcgtggctgggaagatgagcatctcccctaacaccacctacccctccctcctggaggatggtcgtgtcgagtacagagtggccctcaccgaggaccggctgccccgcctggaggagatccgcatctggggacccctccaggaagatgctgacatccaggtttacaggcggtatggcgaggagtatggcaacctcacccgcccagacatcaccttcacctacttccagcctaagccacggcaggcctgggtgtgggccgctgtgcgtgggccctgctcggtgagctgtggggcagggctgcgctgggtaaactacagctgcctggaccaggccaggaaggagttggtggagactgtccagtgccaagggagccagcagccaccagcgtggccagaggcctgcgtgctcgaaccctgccctccctactgggcggtgggagacttcggcccatgcagcgcctcctgtgggggcggcctgcgggagcggccagtgcgctgcgtggaggcccagggcagcctcctgaagacattgcccccagcccggtgcagagcaggggcccagcagccagctgtggcgctggaaacctgcaacccccagccctgccctgccaggtgggaggtgtcagagcccagctcatgcacatcagctggtggagcaggcctggccttggagaacgagacctgtgtgccaggggcagatggcctggaggctccagtgactgaggggcctggctccgtagatgagaagctgcctgcccctgagccctgtgtcgggatgtcatgtcctccaggctggggccatctggatgccacctctgcaggggagaaggctccctccccatggggcagcatcaggacgggggctcaagctgcacacgtgtggacccctgcggcagggtcgtgctccgtctcctgcgggcgaggtctgatggagctgcgtttcctgtgcatggactctgccctcagggtgcctgtccaggaagagctgtgtggcctggcaagcaagcctgggagccggcgggaggtctgccaggctgtcccgtgccctgctcggtggcagtacaagctggcggcctgcagcgtgagctgtgggagaggggtcgtgcggaggatcctgtattgtgcccgggcccatggggaggacgatggtgaggagatcctgttggacacccagtgccaggggctgcctcgcccggaaccccaggaggcctgcagcctggagccctgcccacctaggtggaaagtcatgtcccttggcccatgttcggccagctgtggccttggcactgctagacgctcggtggcctgtgtgcagctcgaccaaggccaggacgtggaggtggacgaggcggcctgtgcggcgctggtgcggcccgaggccagtgtcccctgtctcattgccgactgcacctaccgctggcatgttggcacctggatggagtgctctgtttcctgtggggatggcatccagcgccggcgtgacacctgcctcggaccccaggcccaggcgcctgtgccagctgatttctgccagcacttgcccaagccggtgactgtgcgtggctgctgggctgggccctgtgtgggacagggtacgcccagcctggtgccccacgaagaagccgctgctccaggacggaccacagccacccctgctggtgcctccctggagtggtcccaggcccggggcctgctcttctccccggctccccagcctcggcggctcctgcccgggccccaggaaaactcagtgcagtccagtgcctgtggcaggcagcaccttgagccaacaggaaccattgacatgcgaggcccagggcaggcagactgtgcagtggccattgggcggcccctcggggaggtggtgaccctccgcgtccttgagagttctctcaactgcagtgcgggggacatgttgctgctttggggccggctcacctggaggaagatgtgcaggaagctgttggacatgactttcagctccaagaccaacacgctggtggtgaggcagcgctgcgggcggccaggaggtggggtgctgctgcggtatgggagccagcttgctcctgaaaccttctacagagaatgtgacatgcagctctttgggccctggggtgaaatcgtgagcccctcgctgagtccagccacgagtaatgcagggggctgccggctcttcattaatgtggctccgcacgcacggattgccatccatgccctggccaccaacatgggcgctgggaccgagggagccaatgccagctacatcttgatccgggacacccacagcttgaggaccacagcgttccatgggcagcaggtgctctactgggagtcagagagcagccaggctgagatggagttcagcgagggcttcctgaaggctcaggccagcctgcggggccagtactggaccctccaatcatgggtaccggagatgcaggaccctcagtcctggaagggaaaggaaggaacctgagggtcattgaacatttgttccgtgtctggccagccctggagggttgacccctggtctcagtgctttccaattcgaactttttccaatcttaggtatctactttagagtcttctccaatgtccaaaaggctagggggttggaggtggggactctggaaaagcagcccccatttcctcgggtaccaataaataaaacatgcaggctgaaaaaaaa

SEQ ID NO: 40 - DNA, 4680 bp, Homo sapiens
aaccacgatgtctttggcacagcctctcatctgtcagatgggagcggggaccccggagagggagtcagccgaggtcctggcattccttgtgaacccccgtctgtgggtttctggtccagtgtcccttctccagattagatggcttaggcctcctctaagggggtgggcgtgcacatccggagagctgtctggtgtgcaggactgggctgcaggttaccctgaactgcaaccatcttagagcaaggcccagcttgcagcaggaggagctgcaggccgcccaccctagccacggcccctgccctggcaggaagcttccaagagtaaacactgcctaatcgtcccgcccagtagtgagcaggcctgtcccattccatactgaccagattcccagtcaccaaggccccctctcactccgctccactcctcgggctggctctcctgaggatgcaccagcgtcacccccgggcaagatgccctcccctctgtgtggccggaatccttgcctgtggctttctcctgggctgctggggaccctcccatttccagcagagttgtcttcaggctttggagccacaggccgtgtcttcttacttgagccctggtgctcccttaaaaggccgccctccttcccctggcttccagaggcagaggcagaggcagaggcgggctgcaggcggcatcctacacctggagctgctggtggccgtgggccccgatgtcttccaggctcaccaggaggacacagagcgctatgtgctcaccaacctcaacatcggggcagaactgcttcgggacccgtccctgggggctcagtttcgggtgcacctggtgaagatggtcattctgacagagcctgagggtgccccaaatatcacagccaacctcacctcgtccctgctgagcgtctgtgggtggagccagaccatcaaccctgaggacgacacggatcctggccatgctgacctggtcctctatatcactaggtttgacctggagttgcctgatggtaaccggcaggtgcggggcgtcacccagctgggcggtgcctgctccccaacctggagctgcctcattaccgaggacactggcttcgacctgggagtcaccattgcccatgagattgggcacagcttcggcctggagcacgacggcgcgcccggcagcggctgcggccccagcggacacgtgatggcttcggacggcgccgcgccccgcgccggcctcgcctggtccccctgcagccgccggcagctgctgagcctgctcagcgccaacgagcagtgccgcgtggccttcggccccaaggctgtcgcctgcaccttcgccagggagcacctggatatgtgccaggccctctcctgccacacagacccgctggaccaaagcagctgcagccgcctcctcgttcctctcctggatgggacagaatgtggcgtggagaagtggtgctccaagggtcgctgccgctccctggtggagctgacccccatagcagcagtgcatgggcgctggtctagctggggtccccgaagtccttgctcccgctcctgcggaggaggtgtggtcaccaggaggcggcagtgcaacaaccccagacctgcctttggggggcgtgcatgtgttggtgctgacctccaggccgagatgtgcaacactcaggcctgcgagaagacccagctggagttcatgtcgcaacagtgcgccaggaccgacggccagccgctgcgctcctcccctggcggcgcctccttctaccactggggtgctgctgtaccacacagccaaggggatgctctgtgcagacacatgtgccgggccattggcgagagcttcatcatgaagcgtggagacagcttcctcgatgggacccggtgtatgccaagtggcccccgggaggacgggaccctgagcctgtgtgtgtcgggcagctgcaggacatttggctgtgatggtaggatggactcccagcaggtatgggacaggtgccaggtgtgtggtggggacaacagcacgtgcagcccacggaagggctctttcacagctggcagagcgagagaatatgtcacatttctgacagttacccccaacctgaccagtgtctacattgccaaccacaggcctctcttcacacacttggcggtgaggatcggagggcgctatgtcgtggctgggaagatgagcatctcccctaacaccacctacccctccctcctggaggatggtcgtgtcgagtacagagtggccctcaccgaggaccggctgccccgcctggaggagatccgcatctggggacccctccaggaagatgctgacatccaggtttacaggcggtatggcgaggagtatggcaacctcacccgcccagacatcaccttcacctacttccagcctaagccacggcaggcctgggtgtgggccgctgtgcgtgggccctgctcggtgagctgtggggcagggctgcgctgggtaaactacagctgcctggaccaggccaggaaggagttggtggagactgtccagtgccaagggagccagcagccaccagcgtggccagaggcctgcgtgctcgaaccctgccctccctactgggcggtgggagacttcggcccatgcagcgcctcctgtgggggcggcctgcgggagcggccagtgcgctgcgtggaggcccagggcagcctcctgaagacattgcccccagcccggtgcagagcaggggcccagcagccagctgtggcgctggaaacctgcaacccccagccctgccctgccaggtgggaggtgtcagagcccagctcatgcacatcagctggtggagcaggcctggccttggagaacgagacctgtgtgccaggggcagatggcctggaggctccagtgactgaggggcctggctccgtagatgagaagctgcctgcccctgagccctgtgtcgggatgtcatgtcctccaggctggggccatctggatgccacctctgcaggggagaaggctccctccccatggggcagcatcaggacgggggctcaagctgcacacgtgtggacccctgcggcagggtcgtgctccgtctcctgcgggcgaggtctgatggagctgcgtttcctgtgcatggactctgccctcagggtgcctgtccaggaagagctgtgtggcctggcaagcaagcctgggagccggcgggaggtctgccaggctgtcccgtgccctgctcggtggcagtacaagctggcggcctgcagcgtgagctgtgggagaggggtcgtgcggaggatcctgtattgtgcccgggcccatggggaggacgatggtgaggagatcctgttggacacccagtgccaggggctgcctcgcccggaaccccaggaggcctgcagcctggagccctgcccacctaggtggaaagtcatgtcccttggcccatgttcggccagctgtggccttggcactgctagacgctcggtggcctgtgtgcagctcgaccaaggccaggacgtggaggtggacgaggcggcctgtgcggcgctggtgcggcccgaggccagtgtcccctgtctcattgccgactgcacctaccgctggcatgttggcacctggatggagtgctctgtttcctgtggggatggcatccagcgccggcgtgacacctgcctcggaccccaggcccaggcgcctgtgccagctgatttctgccagcacttgcccaagccggtgactgtgcgtggctgctgggctgggccctgtgtgggacagggtgcctgtggcaggcagcaccttgagccaacaggaaccattgacatgcgaggcccagggcaggcagactgtgcagtggccattgggcggcccctcggggaggtggtgaccctccgcgtccttgagagttctctcaactgcagtgcgggggacatgttgctgctttggggccggctcacctggaggaagatgtgcaggaagctgttggacatgactttcagctccaagaccaacacgctggtggtgaggcagcgctgcgggcggccaggaggtggggtgctgctgcggtatgggagccagcttgctcctgaaaccttctacagagaatgtgacatgcagctctttgggccctggggtgaaatcgtgagcccctcgctgagtccagccacgagtaatgcagggggctgccggctcttcattaatgtggctccgcacgcacggattgccatccatgccctggccaccaacatgggcgctgggaccgagggagccaatgccagctacatcttgatccgggacacccacagcttgaggaccacagcgttccatgggcagcaggtgctctactgggagtcagagagcagccaggctgagatggagttcagcgagggcttcctgaaggctcaggccagcctgcggggccagtactggaccctccaatcatgggtaccggagatgcaggaccctcagtcctggaagggaaaggaaggaacctgagggtcattgaacatttgttccgtgtctggccagccctggagggttgacccctggtctcagtgctttccaattcgaactttttccaatcttaggtatctactttagagtcttctccaatgtccaaaaggctagggggttggaggtggggactctggaaaagcagcccccatttcctcgggtaccaataaataaaacatgcaggctgaaaaaaaa

SEQ ID NO: 41 - DNA, 4773 bp, Homo sapiens
aaccacgatgtctttggcacagcctctcatctgtcagatgggagcggggaccccggagagggagtcagccgaggtcctggcattccttgtgaacccccgtctgtgggtttctggtccagtgtcccttctccagattagatggcttaggcctcctctaagggggtgggcgtgcacatccggagagctgtctggtgtgcaggactgggctgcaggttaccctgaactgcaaccatcttagagcaaggcccagcttgcagcaggaggagctgcaggccgcccaccctagccacggcccctgccctggcaggaagcttccaagagtaaacactgcctaatcgtcccgcccagtagtgagcaggcctgtcccattccatactgaccagattcccagtcaccaaggccccctctcactccgctccactcctcgggctggctctcctgaggatgcaccagcgtcacccccgggcaagatgccctcccctctgtgtggccggaatccttgcctgtggctttctcctgggctgctggggaccctcccatttccagcagagttgtcttcaggctttggagccacaggccgtgtcttcttacttgagccctggtgctcccttaaaaggccgccctccttcccctggcttccagaggcagaggcagaggcagaggcgggctgcaggcggcatcctacacctggagctgctggtggccgtgggccccgatgtcttccaggctcaccaggaggacacagagcgctatgtgctcaccaacctcaacatcggggcagaactgcttcgggacccgtccctgggggctcagtttcgggtgcacctggtgaagatggtcattctgacagagcctgagggtgccccaaatatcacagccaacctcacctcgtccctgctgagcgtctgtgggtggagccagaccatcaaccctgaggacgacacggatcctggccatgctgacctggtcctctatatcactaggtttgacctggagttgcctgatggtaaccggcaggtgcggggcgtcacccagctgggcggtgcctgctccccaacctggagctgcctcattaccgaggacactggcttcgacctgggagtcaccattgcccatgagattgggcacagcttcggcctggagcacgacggcgcgcccggcagcggctgcggccccagcggacacgtgatggcttcggacggcgccgcgccccgcgccggcctcgcctggtccccctgcagccgccggcagctgctgagcctgctcagcgcaggacgggcgcgctgcgtgtgggacccgccgcggcctcaacccgggtccgcggggcacccgccggatgcgcagcctggcctctactacagcgccaacgagcagtgccgcgtggccttcggccccaaggctgtcgcctgcaccttcgccagggagcacctggatatgtgccaggccctctcctgccacacagacccgctggaccaaagcagctgcagccgcctcctcgttcctctcctggatgggacagaatgtggcgtggagaagtggtgctccaagggtcgctgccgctccctggtggagctgacccccatagcagcagtgcatgggcgctggtctagctggggtccccgaagtccttgctcccgctcctgcggaggaggtgtggtcaccaggaggcggcagtgcaacaaccccagacctgcctttggggggcgtgcatgtgttggtgctgacctccaggccgagatgtgcaacactcaggcctgcgagaagacccagctggagttcatgtcgcaacagtgcgccaggaccgacggccagccgctgcgctcctcccctggcggcgcctccttctaccactggggtgctgctgtaccacacagccaaggggatgctctgtgcagacacatgtgccgggccattggcgagagcttcatcatgaagcgtggagacagcttcctcgatgggacccggtgtatgccaagtggcccccgggaggacgggaccctgagcctgtgtgtgtcgggcagctgcaggacatttggctgtgatggtaggatggactcccagcaggtatgggacaggtgccaggtgtgtggtggggacaacagcacgtgcagcccacggaagggctctttcacagctggcagagcgagagaatatgtcacatttctgacagttacccccaacctgaccagtgtctacattgccaaccacaggcctctcttcacacacttggcggtgaggatcggagggcgctatgtcgtggctgggaagatgagcatctcccctaacaccacctacccctccctcctggaggatggtcgtgtcgagtacagagtggccctcaccgaggaccggctgccccgcctggaggagatccgcatctggggacccctccaggaagatgctgacatccaggtttacaggcggtatggcgaggagtatggcaacctcacccgcccagacatcaccttcacctacttccagcctaagccacggcaggcctgggtgtgggccgctgtgcgtgggccctgctcggtgagctgtggggcagggctgcgctgggtaaactacagctgcctggaccaggccaggaaggagttggtggagactgtccagtgccaagggagccagcagccaccagcgtggccagaggcctgcgtgctcgaaccctgccctccctactgggcggtgggagacttcggcccatgcagcgcctcctgtgggggcggcctgcgggagcggccagtgcgctgcgtggaggcccagggcagcctcctgaagacattgcccccagcccggtgcagagcaggggcccagcagccagctgtggcgctggaaacctgcaacccccagccctgccctgccaggtgggaggtgtcagagcccagctcatgcacatcagctggtggagcaggcctggccttggagaacgagacctgtgtgccaggggcagatggcctggaggctccagtgactgaggggcctggctccgtagatgagaagctgcctgcccctgagccctgtgtcgggatgtcatgtcctccaggctggggccatctggatgccacctctgcaggggagaaggctccctccccatggggcagcatcaggacgggggctcaagctgcacacgtgtggacccctgcggcagggtcgtgctccgtctcctgcgggcgaggtctgatggagctgcgtttcctgtgcatggactctgccctcagggtgcctgtccaggaagagctgtgtggcctggcaagcaagcctgggagccggcgggaggtctgccaggctgtcccgtgccctgctcggtggcagtacaagctggcggcctgcagcgtgagctgtgggagaggggtcgtgcggaggatcctgtattgtgcccgggcccatggggaggacgatggtgaggagatcctgttggacacccagtgccaggggctgcctcgcccggaaccccaggaggcctgcagcctggagccctgcccacctaggtggaaagtcatgtcccttggcccatgttcggccagctgtggccttggcactgctagacgctcggtggcctgtgtgcagctcgaccaaggccaggacgtggaggtggacgaggcggcctgtgcggcgctggtgcggcccgaggccagtgtcccctgtctcattgccgactgcacctaccgctggcatgttggcacctggatggagtgctctgtttcctgtggggatggcatccagcgccggcgtgacacctgcctcggaccccaggcccaggcgcctgtgccagctgatttctgccagcacttgcccaagccggtgactgtgcgtggctgctgggctgggccctgtgtgggacagggtgcctgtggcaggcagcaccttgagccaacaggaaccattgacatgcgaggcccagggcaggcagactgtgcagtggccattgggcggcccctcggggaggtggtgaccctccgcgtccttgagagttctctcaactgcagtgcgggggacatgttgctgctttggggccggctcacctggaggaagatgtgcaggaagctgttggacatgactttcagctccaagaccaacacgctggtggtgaggcagcgctgcgggcggccaggaggtggggtgctgctgcggtatgggagccagcttgctcctgaaaccttctacagagaatgtgacatgcagctctttgggccctggggtgaaatcgtgagcccctcgctgagtccagccacgagtaatgcagggggctgccggctcttcattaatgtggctccgcacgcacggattgccatccatgccctggccaccaacatgggcgctgggaccgagggagccaatgccagctacatcttgatccgggacacccacagcttgaggaccacagcgttccatgggcagcaggtgctctactgggagtcagagagcagccaggctgagatggagttcagcgagggcttcctgaaggctcaggccagcctgcggggccagtactggaccctccaatcatgggtaccggagatgcaggaccctcagtcctggaagggaaaggaaggaacctgagggtcattgaacatttgttccgtgtctggccagccctggagggttgacccctggtctcagtgctttccaattcgaactttttccaatcttaggtatctactttagagtcttctccaatgtccaaaaggctagggggttggaggtggggactctggaaaagcagcccccatttcctcgggtaccaataaataaaacatgcaggctgaaaaaaaa

SEQ ID NO: 42 - DNA, 6215 bp, Homo sapiens
cccatgagcgcgccgcggcccgggctggcgtgcgggtgcggctgcggcggccgcgcggcggggccccgggaggcgggtcgctgagcggggcgcgcggccccgaggatgcgggagcgggagcgggagcagcgctggcgtcaatgctcccttcctcgggccattggagactccgttgctttttaatggcggcagcggctgctgggtgagcagctggaggccggacagtgttcgtcccatccggagaggatcgctttctcctggcgtcaccagcgctgggttggtgggggtagcttttccctctttgctcctccattcttgaagaaagaagaagatgccactgccatttgggttgaaactgaaacgcacccggcgctacacggtgtccagcaagagttgcctggttgcccggatccaactgcttaataacgagtttgtggagttcaccctgtccgtggagagcactggccaggaaagcctcgaggccgtggcccagaggctggagctgcgggaggtcacttacttcagcctctggtactacaacaagcaaaatcagcgccggtgggtagatttggaaaaacctttgaagaagcagctggataaatatgcattggaacctaccgtctattttggagtggtgttttatgtgccttcagtttctcagctgcagcaggagattaccaggtatcagtattatctgcaactgaagaaagatatcttggaaggaagtattccttgtaccttagaacaagcaattcagctagcaggcttagctgttcaagcggattttggtgactttgatcagtatgaatcccaggactttcttcagaaatttgccttgtttcctgtgggatggttacaagatgaaaaagtattggaagaagcaacccaaaaagtggccttactacatcagaaatacagagggctcacagctcctgatgctgaaatgctgtacatgcaggaggtagagagaatggatggctatggagaagagagctaccctgctaaggatagccaaggaagtgacatatccattggagcgtgtcttgaaggtatctttgtgaaacacaagaatggaaggcatcctgtggtatttaggtggcatgacattgccaacatgtcccacaacaagtccttttttgcattagagctggcaaataaagaggagaccattcaatttcaaactgaagacatggaaacagcaaaatacatttggagactctgtgttgcgcgacacaagttttacagactaaaccagtgtaacctgcaaactcagactgtcacagtgaacccaatcaggaggaggtcttcttcaaggatgtctctgcctaaaccccagccctacgtgatgcctcccccaccgcagttgcactataatggacattatacagaaccatatgcttcttcccaagataacctctttgtgcccaaccagaacggatactactgtcactctcagacaagcttggatagagcccagattgacctcaacggtcggatccgtaatggcagtgtctacagtgcacacagcaccaactccttaaataatcctcagccctacttgcagccctcgccgatgtcgtccaaccctagcatcaccgggagtgacgtcatgaggcctgactacctcccgtcccatcggcacagcgccgtgatacccccgtcctaccgccccaccccagactatgagactgtgatgaagcagctcaacaggggcctggtgcatgcggaacggcagagccactcgctgcgaaacctcaacatcggcagctcgtacgcctacagcaggcccgcggcgctggtctacagccagcccgagatccgcgagcacgcacagctcccctcgccagcggccgcacactgcccgttcagcctgagctacagcttccacagcccgtctccctacccctaccctgccgagcggcggcccgtggtgggcgcggtcagcgtgccggagctgaccaatgcgcagctgcaggcgcaggactacccgtctcccaacatcatgcggacgcaggtgtaccggccacccccaccctacccgccccccaggcccgccaacagcacgccagacctgtcccgccacctttacatcagcagcagcaaccccgacctcatcacgcggcgcgtgcaccactcggtgcaaacgttccaggaggacagcctgcccgtggcgcactcgctgcaggaggtcagcgagcccctcaccgccgcgcgccacgcgcagctgcacaaacggaacagcatcgaggtggccgggctcagccacggcctggagggcctgcggctcaaggagcgcaccctatccgcgtcggcggcagaggtggcgccgcgagccgtctcggtgggctcccagcccagcgttttcaccgagaggacacagcgagaagggccggaggaggcggagggcttgaggtacggccataagaagtccctgtcggacgccaccatgctaatccacagcagcgaggaggaggaggacgaggacttcgaggaggagagcggggcccgggcgcctcctgcacgtgcgcgcgagcctcggcccggcctggcccaggacccacctggctgccctcgcgtcctgctcgccgggcccctgcacatcctggagcccaaggcccacgtcccagacgcggagaagaggatgatggacagcagccccgtccgcacgaccgcagaggcccagcggccctggagagacgggctgctgatgccctccatgtcggagtccgacctcaccacgtcaggccgctaccgagcccggagggactctctgaagaaaaggccggtgtcggaccttctctctgggaagaagaacatcgtggaagggctcccgcctctagggggaatgaaaaagactcgagtagatgcaaaaaaaattggtcctcttaaactggctgccctaaatggactctccctatctcgagtgcctctgcctgatgaaggaaaggaagtggctaccagagcaacgaatgatgaaaggtgtaaaattctggaacaacgattagaacaaggaatggtattcacagaatatgaaagaattcttaagaaacggctagttgatggggagtgctcaacagcacgactccctgaaaatgcagaaagaaatcgattccaagatgttcttccttatgatgatgtgagagtggagttggtcccaactaaagaaaacaacactggttacatcaacgcatcacatattaaggtctctgtcagtggaatcgaatgggattatattgccacacagggaccattacagaatacctgtcaagatttttggcagatggtatgggaacagggaattgcaattatagcaatggtgacagcagaagaggagggtggaagggagaagagctttaggtactggccacgacttggttccaggcacaacactgtcacctatggaaggtttaagatcacgacccggttccgcacagactctggctgctatgccaccacaggcctgaagatgaagcacctccttactgggcaagagaggaccgtctggcacctccaatacacagactggcctgaacatggctgtccagaagacctcaagggatttttatcatatcttgaagagatccagtctgttcgacgccatacaaatagcacaagtgatccccaaagccccaaccctccgttgttggtccactgcagtgctggggtaggaaggactggcgtggtgattttgtcggagatcatgatcgcctgcctggaacacaatgaggtgctggacatcccgagagtgctggacatgctgaggcaacagagaatgatgctggtgcagactctctgccagtacacatttgtgtacagagtcctcatccagttcctgaaaagctccaggctcatctaagctcccacaatttcttacggggccagtcatgtgaagcgtttacagcttaaaaaaaaagcgcttgcctaactcatactttcccgttgacacttgatccacgcagcgtggcactgggacgtaagtggcgcagtctgaatggcggcacgctgaaggaaacgtgcgaagcacaggctgaagaggggtttctaacctgggaaaggtgctcaaggaggacttggtttcaagggccttgccctgccccggtctgtccggtttgcagtacttgcacacattttggagattgtattttctagacaattctctattttactgaagctatgctgggcaattctggcaatcattaaagtgcatagatttctatcttaaactaatttttgataatggagtttttattttatgacaaatatttagggatttttctagtgagaaacaactttgtgtaaggatgatccacagatatgagttgctcctatataactttgtatttaaaaatcatgttattatcttttgttattttttaaaaaccttgggtacttaataatggtttagttgccaaactgaaaactatactgagaatctgtgttattttgaaacatcaaaaggatttttctatccagaacattttttatcctaaaaattctatatagttgtaccttctgtttttcaaatgagagctcaattcatttagatactgaaatgagtcagttaatgtaaagttgaggatgaaggcacattatttaaaatgtaagagaataagcattattttttcagtattattcatagatctaaatgaatttgattttattggttgaaaatgaagtgaaaaacaattgcctagggtggttttaagcacttttttgttaaaaacaaatctgagttttaatatatgtgttgctttgtagatgacacaataacaatgggcgctgagaagcgttttgggagagattaaggactaagagtatgtaagatgactaggacaagagtaggtggagtgtgatggtaaatgcaggatgccttcgtctttacaaaaatgcagtattatctatactcagactgaggtgctgggatggcgagcaggggaccccacagcactgtccccagggaattcaagtcctgtgaccgccagtgacttactccgtttccttggggcttttcccacctcaacctgtattgtttctttttcataaataaattcagcattatagtatcattaaaagaagccttaaagaggcgtatttttccttttggttgaaggaagggaatagttaataatagttttcacctcttctcccaaaaagtacagtccaaatttgtgcacagagattgctgtggtattcaagaggtacttgcattttagctccttaataattccctggccagtgttagctgtttagtgccccctcacccatcccatttaggcacatcccaatagacagagccaggctgagttacagggggagagtgtcatctctggccccgattaagatggccttgtcacagtgaccgctgagtaggcatggatgagtgggatatttagctgaggaaccctttcccttttccttctttttggggtctcttcttacagtgaacttccaaaatgtcaaatctagggctgtttcccaaattacactattctaggcatcattttgattcccatgtcactccttaactcacttccttgagcactacatgtatgttgtcagccacgagacaggacttcctaaatagtgtgtgcaccagcctaactctgccttacccagaaaccaaccacctaagaggaaaactcagaagatattaatgaaaactaattgaaagtacgcacacttctcatgtaggaacaaaattaaaattttacatttttattttacaaaattaaaaaattacattttgtaggaacaaaatgtaaattttgtaaatacaaaattctttttaaagtcctgtttaaagaacagtagaactaagtgaaaatattcagaacgagctccttagaagaaaggaataagaactttttactggaactattttccatctctagaaaaagtgcttcttcccctccccctccctctccatggtacgtttttgtgaaaatgcttttctgtcaggtttaaacaaacagtttgacatagctcgttgacaagaacatattgtaaaacaaatctaattaaagagtaatatgtggtctatttgtgttcctgttgtaataatttgataagtaaacttctgagggcaaaattactgtttaatattactcttaaaatgttgcatgtttggcgtcattcctaagagccatgtaattttaaacttttaattgcagttagtgaatatgaaaggatttctgaataaaaatctatccacatta

SEQ ID NO: 43 - DNA, 2997 bp, Homo sapiens
caagaggtgcagagcaagcgcatgcgtcgtgacggcccggcttaggcgactctgggcgggtctgggccgctccagtgttttggggcacagaagctgtgggaggagctggaggcttcaccgtggtaaccacagcgccgctgctgccccgccttgcaggcctcaggactgtcatcgcctctgggtgtgagggtactttggccaccgtccccggaaataaccgcgcctgcctctcaagataccccatcctctccacgccgctgccgctgccgccatgcaaggggaggacgccagatacctcaaaaggaaagttaaaggagggaatatagatgtacatccatcagaaaaagcactcattgttcactatgaagtggaagctaccattcttggagaaatgggggaccccatgttgggagaacgaaaagaatgtcaaaaaatcattcgacttaagagtctcaatgccaacacagatataacttccctggcaaggaaggtggttgaagaatgtaaactcattcatccttcaaaactaaatgaggtagaacagctgttgtactatctacagaaccgccgtgattcattgtcaggaaaagagaaaaaagaaaaatcaagcaagcctaaagatccacctccttttgaaggaatggagattgatgaagttgctaacattaatgacatggatgaatatattgagttattatatgaagatattcctgacaaagttcggggttctgctttgatcctgcagcttgctcgaaatcctgataacttggaagaactactattgaatgaaactgcccttggtgcattagcaagggtcctgagagaagactggaagcaaagtgtcgagttagctacaaacataatttacatctttttttgtttctccagcttttctcaatttcatggacttattactcactataaaattggagctctgtgtatgaatattattgatcatgagttaaaaagacatgagctttggcaagaagaactctcaaagaagaagaaagctgttgatgaagaccctgaaaaccaaaccttgagaaaggattatgaaaaaacctttaaaaagtaccaggggcttgtggtaaaacaggaacagctattacgagttgctctttatttgcttctgaatcttgctgaggatactcgtaccgaactgaaaatgaggaacaagaacatagttcacatgttggtgaaagcccttgatcgggacaattttgagctgctaattttagttgtgtcattcttgaagaaactcagcatttttatggagaataaaaatgatatggtggaaatggatattgttgaaaaactggtgaaaatgataccttgtgagcatgaagacctgctgaatatcaccctccgacttttactaaacctatcctttgacacaggactgaggaataagatggtacaagttggactgcttcccaagctcactgcactcctaggcaatgacaactacaaacaaatagcaatgtgtgttctttaccacataagcatggatgaccgctttaaatcaatgtttgcatacactgactgtataccacagttaatgaagatgctgtttgaatgttcagatgaacgaattgacttggaactcatttctttctgcattaatcttgctgctaacaaaagaaatgtacagcttatctgtgaaggaaatgggctgaagatgctcatgaagagggctctgaagtttaaggatccattgctgatgaaaatgattagaaacatttctcagcatgatggaccaactaaaaatctgtttattgattatgttggggaccttgcagcccagatctctaatgatgaagaagaggagtttgtgattgaatgtttgggaactcttgcaaacttgaccattccagacttagactgggaattggttcttaaagaatataagttggttccatacctcaaggataaactaaaaccaggtgctgcagaagatgatcttgttttagaagtggttataatgattggaactgtatccatggatgactcttgtgctgcattgctagccaaatctggcataatccctgcactcattgaattgctaaatgctcaacaagaagatgatgaatttgtgtgtcagataatttatgtcttctaccagatggttttccaccaagccacaagagacgtcataatcaaggaaacacaggctccagcatatctcatagacctaatgcatgataagaataatgaaatccgaaaggtctgtgataatacattagatattatagcggaatatgatgaagaatgggctaagaaaattcagagtgaaaagtttcgctggcataactctcagtggctggagatggtagagagtcgtcagatggatgagagtgagcagtacttgtatggtgatgatcgaattgagccatacattcatgaaggagatattctcgaaagacctgaccttttctacaactcagatggattaattgcctctgaaggagccataagtcccgatttcttcaatgattaccaccttcaaaatggagatgttgttgggcagcattcatttcctggcagccttggaatggatggctttggccaaccagttggcattcttggacgccctgccacagcatatggattccgccctgatgaaccttactactatggctatggatcttgataaagtatctgtttccatgtgtaatctcagcttagaagaaatctgtgtgggttgggttaattttggatctttgcctaataatgcatgttgatgttattgtgggtctgtgtttgtttttatttttatatgttgttagctgcagattaaccccagcccctctgtcttctgttaagtacagttgatactgacattgttcactcatcaaaccacatcttgatgctaagtaacatttcccatgagcctcaaaactgaatgctgaaaagctactagactggaaaacaaacactgcattatgtatgttaagtgactaatttaatttcaattaaaaagcgtaaagtgaaaatgaa

SEQ ID NO: 44 - DNA, 2488 bp, Homo sapiens
ttttgtccgcctgccgccgccgtcccagatattaatcacggagttccagggagaaggaacttgtgaaatgggggagccggctggggttgccggcaccatggagtcaccttttagcccgggactctttcacaggctggatgaagattgggattctgctctctttgctgaactcggttatttcacagacactgatgagctgcaattggaagcagcaaatgagacgtatgaaaacaattttgataatcttgattttgatttggatttgatgccttgggagtcagacatttgggacatcaacaaccaaatctgtacagttaaagatattaaggcagaacctcagccactttctccagcctcctcaagttattcagtctcgtctcctcggtcagtggactcttattcttcaactcagcatgttcctgaggagttggatttgtcttctagttctcagatgtctcccctttccttatatggtgaaaactctaatagtctctcttcagcggagccactgaaggaagataagcctgtcactggtcctaggaacaagactgaaaatggactgactccaaagaaaaaaattcaggtgaattcaaaaccttcaattcagcccaagcctttattgcttccagcagcacccaagactcaaacaaactccagtgttccagcaaaaaccatcattattcagacagtaccaacgcttatgccattggcaaagcagcaaccaattatcagtttacaacctgcacccactaaaggccagacggttttgctgtctcagcctactgtggtacaacttcaagcacctggagttctgccctctgctcagccagtccttgctgttgctgggggagtcacacagctccctaatcacgtggtgaatgtggtaccagccccttcagcgaatagcccagtgaatggaaaactttccgtgactaaacctgtcctacaaagtaccatgagaaatgtcggttcagatattgctgtgctaaggagacagcaacgtatgataaaaaatcgagaatccgcttgtcagtctcgcaagaagaagaaagaatatatgctagggttagaggcgagattaaaggctgccctctcagaaaacgagcaactgaagaaagaaaatggaacactgaagcggcagctggatgaagttgtgtcagagaaccagaggcttaaagtccctagtccaaagcgaagagttgtctgtgtgatgatagtattggcatttataatactgaactatggacctatgagcatgttggaacaggattccaggagaatgaaccctagtgtgagccctgcaaatcaaaggaggcaccttctaggattttctgctaaagaggcacaggacacatcagatggtattatccagaaaaacagctacagatatgatcattctgtttcaaatgacaaagccctgatggtgctaactgaagaaccattgctttacattcctccacctccttgtcagcccctaattaacacaacagagtctctcaggttaaatcatgaacttcgaggatgggttcatagacatgaagtagaaaggaccaagtcaagaagaatgacaaataatcaacagaaaacccgtattcttcagggtgctctggaacagggctcaaattctcagctgatggctgttcaatacacagaaaccactagtagtatcagcaggaactcagggagtgagctacaagtgtattatgcttcacccagaagttatcaagacttttttgaagccatccgcagaaggggagacacattttatgttgtgtcatttcgaagggatcacctgctgttaccagctaccacccataacaagaccacaagaccaaaaatgtcaattgtgttaccagcaataaacataaatgagaatgtgatcaatgggcaggactacgaagtgatgatgcagattgactgtcaggtgatggacaccaggatcctccatatcaaaagttcgtcagttcctccttacctccgagatcagcagaggaatcaaaccaacaccttctttggctcccctcccgcagccacagaggcaacccacgttgtcagcaccatccctgagtcattacaatagcaccctgcagctatgctggaaaactgagcgtgggaccctgccagactgaagagcaggtgagcaaaatgctgctttctgccttggtggcaggcagagaactgtctcgtactagaattcaaggaggaaagaagaagaaataaaagaagctgctccatttttcatcatctacccatctatttggaaagcactggaattcagatgcaagagaacaatgtttcttcagtggcaaatgtagccctgcatcctccagtgttacctggtgtagatttttttttctgtacctttctaaacctctcttccctctgtgatggttttgtgtttaaacagtcatcttcttttaaataatatccacctctcctttttgccatttcacttattgattcataaagtgaattttatttaaagcta

SEQ ID NO: 45 - DNA, 3189 bp, Homo sapiens
ggccgcttgcttcctgtttgtccgacgaggagacatggcggcggcgccggtagcggctgggtctggagccggccgagggagacggtcggcagccacagtggcggcttggggcggatggggcggccggccgcggcctggtaacattctgctgcagctgcggcagggccagctgaccggccggggcctggtccgggcggtgcagttcactgagacttttttgacggagagggacaaacaatccaagtggagtggaattcctcagctgctcctcaagctgcacaccaccagccacctccacagtgactttgttgagtgtcaaaacatcctcaaggaaatttctcctcttctctccatggaggctatggcatttgttactgaagagaggaaacttacccaagaaaccacttatccaaatacttacatttttgacttgtttggaggtgttgatcttcttgtagaaattcttatgaggcctacgatctctatccggggacagaaactgaaaataagtgatgaaatgtccaaggactgcttgagtatcctgtataatacctgtgtctgtacagagggagttacaaagcgtttggcagaaaagaatgactttgtgatcttcctgtttacattgatgacaagtaagaagacattcttacaaacagcaaccctcattgaagatattttgggtgttaaaaaggaaatgatccgactagatgaagtccccaatctgagttccttagtatccaatttcgatcagcagcagctcgctaatttctgccggattctggctgtcaccatttcagagatggatacagggaatgatgacaagcacacgcttcttgccaaaaatgctcaacagaagaagagcttgagtttggggccttctgcagctgaaatcaatcaagcggcccttctcagcattcctggctttgttgagcggctttgcaaactggcgactcgaaaggtgtcagagtcaacgggcacagccagcttccttcaggagttggaagagtggtacacatggctagacaatgctttggtgctagatgccctgatgcgagtggccaatgaggagtcagagcacaatcaagcctccattgtgttccctcctccaggggcttctgaggagaatggcctgcctcacacgtcagccagaacccagctgccccagtcaatgaagattatgcatgagatcatgtacaaactggaagtgctctatgtcctctgcgtgctgctgatggggcgtcagcgaaaccaggttcacagaatgattgcagagttcaagctgatccctggacttaataatttgtttgacaaactgatttggaggaagcattcagcatctgcccttgtcctccatggtcacaaccagaactgtgactgtagcccggacatcaccttgaagatacagtttttgaggcttcttcagagcttcagtgaccaccacgagaacaagtacttgttactcaacaaccaggagctgaatgaactcagtgccatctctctcaaggccaacatccctgaggtggaagctgtcctcaacaccgacaggagtttggtgtgtgatgggaagaggggcttattaactcgtctgctgcaggtcatgaagaaggagccagcagagtcgtctttcaggttttggcaagctcgggctgtggagagtttcctccgagggaccacctcctatgcagaccagatgttcctgctgaagcgaggcctcttggagcacatcctttactgcattgtggacagcgagtgtaagtcaagggatgtgctccagagttactttgacctcctgggggagctgatgaagttcaacgttgatgcattcaagagattcaataaatatatcaacaccgatgcaaagttccaggtattcctgaagcagatcaacagctccctggtggactccaacatgctggtgcgctgtgtcactctgtccctggaccgatttgaaaaccaggtggatatgaaagttgccgaggtactgtctgaatgccgcctgctcgcctacatatcccaggtgcccacgcagatgtccttcctcttccgcctcatcaacatcatccacgtgcagacgctgacccaggagaacgtcagctgcctcaacaccagcctggtgatcctgatgctggcccgacggaaagagcggctgcccctgtacctgcggctgctgcagcggatggagcacagcaagaagtaccccggcttcctgctcaacaacttccacaacctgctgcgcttctggcagcagcactacctgcacaaggacaaggacagcacctgcctagagaacagctcctgcatcagcttctcatactggaaggagacagtgtccatcctgttgaacccggaccggcagtcaccctctgctctcgttagctacattgaggagccctacatggacatagacagggacttcactgaggagtgaccttgggccaggcctcgggaggctgctgggccagtgtgggtgagcgtgggtacgatgccacacgccctgccctgttcccgttcctccctgctgctctctgcctgccccaggtctttgggtacaggcttggtgggagggaagtcctagaagcccttggtccccctgggtctgagggccctaggtcatggagagcctcagtccccataatgaggacagggtaccatgcccacctttccttcagaaccctggggcccagggccacccagaggtaagaggacatttagcattagctctgtgtgagctcctgccggtttcttggctgtcagtcagtcccagagtggggaggaagatatgggtgacccccaccccccatctgtgagccaagcctcccttgtccctggcctttggacccaggcaaaggcttctgagccctgggcaggggtggtgggtaccagagaatgctgccttcccccaagcctgcccctctgcctcattttcctgtagctcctctggttctgtttgctcattggccgctgtgttcatccaagggggttctcccagaagtgaggggcctttccctccatcccttggggcacggggcagctgtgcctgccctgcctctgcctgaggcagccgctcctgcctgagcctggacatggggcccttccttgtgttgccaatttattaacagcaaataaaccaattaaatggagactattaaataactttattttaaaaatgaaaaaaaaaaaaaaaaaaaa

SEQ ID NO: 46 - DNA, 3165 bp, Homo sapiens
ggccgcttgcttcctgtttgtccgacgaggagacatggcggcggcgccggtagcggctgggtctggagccggccgagggagacggtcggcagccacagtggcggcttggggcggatggggcggccggccgcggcctggtaacattctgctgcagctgcggcagggccagctgaccggccggggcctggtccgggcggtgcagttcactgagacttttttgacggagagggacaaacaatccaagtggagtggaattcctcagctgctcctcaagctgcacaccaccagccacctccacagtgactttgttgagtgtcaaaacatcctcaaggaaatttctcctcttctctccatggaggctatggcatttgttactgaagagaggaaacttacccaagaaaccacttatccaaatacttacatttttgacttgtttggaggtgttgatcttcttgtagaaattcttatgaggcctacgatctctatccggggacagaaactgaaaataagtgatgaaatgtccaaggactgcttgagtatcctgtataatacctgtgtctgtacagagggagttacaaagcgtttggcagaaaagaatgactttgtgatcttcctgtttacattgatgacaagtaagaagacattcttacaaacagcaaccctcattgaagatattttgggtgttaaaaaggaaatgatccgactagatgaagtccccaatctgagttccttagtatccaatttcgatcagcagcagctcgctaatttctgccggattctggctgtcaccatttcagagatggatacagggaatgatgacaagcacacgcttcttgccaaaaatgctcaacagaagaagagcttgagtttggggccttctgcagctgaaatcaatcaagcggcccttctcagcattcctggctttgttgagcggctttgcaaactggcgactcgaaaggtgtcagagtcaacgggcacagccagcttccttcaggagttggaagagtggtacacatggctagacaatgctttggtgctagatgccctgatgcgagtggccaatgaggagtcagagcacaatcaaggggcttctgaggagaatggcctgcctcacacgtcagccagaacccagctgccccagtcaatgaagattatgcatgagatcatgtacaaactggaagtgctctatgtcctctgcgtgctgctgatggggcgtcagcgaaaccaggttcacagaatgattgcagagttcaagctgatccctggacttaataatttgtttgacaaactgatttggaggaagcattcagcatctgcccttgtcctccatggtcacaaccagaactgtgactgtagcccggacatcaccttgaagatacagtttttgaggcttcttcagagcttcagtgaccaccacgagaacaagtacttgttactcaacaaccaggagctgaatgaactcagtgccatctctctcaaggccaacatccctgaggtggaagctgtcctcaacaccgacaggagtttggtgtgtgatgggaagaggggcttattaactcgtctgctgcaggtcatgaagaaggagccagcagagtcgtctttcaggttttggcaagctcgggctgtggagagtttcctccgagggaccacctcctatgcagaccagatgttcctgctgaagcgaggcctcttggagcacatcctttactgcattgtggacagcgagtgtaagtcaagggatgtgctccagagttactttgacctcctgggggagctgatgaagttcaacgttgatgcattcaagagattcaataaatatatcaacaccgatgcaaagttccaggtattcctgaagcagatcaacagctccctggtggactccaacatgctggtgcgctgtgtcactctgtccctggaccgatttgaaaaccaggtggatatgaaagttgccgaggtactgtctgaatgccgcctgctcgcctacatatcccaggtgcccacgcagatgtccttcctcttccgcctcatcaacatcatccacgtgcagacgctgacccaggagaacgtcagctgcctcaacaccagcctggtgatcctgatgctggcccgacggaaagagcggctgcccctgtacctgcggctgctgcagcggatggagcacagcaagaagtaccccggcttcctgctcaacaacttccacaacctgctgcgcttctggcagcagcactacctgcacaaggacaaggacagcacctgcctagagaacagctcctgcatcagcttctcatactggaaggagacagtgtccatcctgttgaacccggaccggcagtcaccctctgctctcgttagctacattgaggagccctacatggacatagacagggacttcactgaggagtgaccttgggccaggcctcgggaggctgctgggccagtgtgggtgagcgtgggtacgatgccacacgccctgccctgttcccgttcctccctgctgctctctgcctgccccaggtctttgggtacaggcttggtgggagggaagtcctagaagcccttggtccccctgggtctgagggccctaggtcatggagagcctcagtccccataatgaggacagggtaccatgcccacctttccttcagaaccctggggcccagggccacccagaggtaagaggacatttagcattagctctgtgtgagctcctgccggtttcttggctgtcagtcagtcccagagtggggaggaagatatgggtgacccccaccccccatctgtgagccaagcctcccttgtccctggcctttggacccaggcaaaggcttctgagccctgggcaggggtggtgggtaccagagaatgctgccttcccccaagcctgcccctctgcctcattttcctgtagctcctctggttctgtttgctcattggccgctgtgttcatccaagggggttctcccagaagtgaggggcctttccctccatcccttggggcacggggcagctgtgcctgccctgcctctgcctgaggcagccgctcctgcctgagcctggacatggggcccttccttgtgttgccaatttattaacagcaaataaaccaattaaatggagactattaaataactttattttaaaaatgaaaaaaaaaaaaaaaaaaaa

SEQ ID NO: 47 - DNA, 689 bp, Homo sapiens
cgcccagtgacctgccgaggtcggcagcacagagctctggagatgaagaccctgttcctgggtgtcacgctcggcctggccgctgccctgtccttcaccctggaggaggaggatatcacagggacctggtacgtgaaggccatggtggtcgataaggactttccggaggacaggaggcccaggaaggtgtccccagtgaaggtgacagccctgggcggtgggaagttggaagccacgttcaccttcatgagggaggatcggtgcatccagaagaaaatcctgatgcggaagacggaggagcctggcaaatacagcgcctatgggggcaggaagctcatgtacctgcaggagctgcccaggagggaccactacatcttttactgcaaagaccagcaccatgggggcctgctccacatgggaaagcttgtgggtaggaattctgataccaaccgggaggccctggaagaatttaagaaattggtgcagcgcaagggactctcggaggaggacattttcacgcccctgcagacgggaagctgcgttcccgaacactaggcagcccccgggtctgcacctccagagcccaccctaccaccagacacagagcccggaccacctggacctaccctccagccatgacccttccctgctcccacccacctgactccaaataaagtccttctccccca

SEQ ID NO: 48 - DNA, 2268 bp, Homo sapiens
acagagctcaggacagggctgaggaaccatgtctccatccccgaccgccctcttctgtcttgggctgtgtctggggcgtgtgccagcgcagagtggaccgctccccaagccctccctccaggctctgcccagctccctggtgcccctggagaagccagtgaccctccggtgccagggacctccgggcgtggacctgtaccgcctggagaagctgagttccagcaggtaccaggatcaggcagtcctcttcatcccggccatgaagagaagtctggctggacgctaccgctgctcctaccagaacggaagcctctggtccctgcccagcgaccagctggagctcgttgccacgggagtttttgccaaaccctcgctctcagcccagcccggcccggcggtgtcgtcaggaggggacgtaaccctacagtgtcagactcggtatggctttgaccaatttgctctgtacaaggaaggggaccctgcgccctacaagaatcccgagagatggtacagggctagttttcccatcatcacggtgaccgccgcccacagcggaacctaccgatgctacagcttctccagcagggacccatacctgtggtcagcccccagcgaccccctggagcttgtggtcacaggaacctctgtgacccccagccggttaccaacagaaccaccttccccggtagcagaattctcagaagccaccgctgaactgaccgtctcattcacaaacgaagtcttcacaactgagacttctaggagtatcaccgccagtccaaaggagtcagactctccagctggtgagtcctgcccgccagtactacaccaagggcaacctggtccggatatgcctcggggctgtgatcctaataatcctggcggggtttctggcagaggactggcacagccggaggaagcgcctgcggcacaggggcagggctgtgcagaggccgcttccgcccctcccgcccctcccgcagacccggaaatcacacgggggtcaggatggaggccgacaggatgttcacagccgcgggttatgttcatgaccgctgaaccccaggcacggtcgtatccaagggagggatcatggcatgggaggcgactcaaagactggcgtgtgtggagcgtggaagcaggagggcagaggctacagctgtggaaacgaggccatgctgcctcctcctggtgttccatcagggagccgttcggccagtgtctgtctgtctgtctgcctctctgtctgagggcaccctccatttgggatggaaggaatctgtggagaccccatcctcctccctgcacactgtggatgacatggtaccctggctggaccacatactggcctctttcttcaacctctctaatatgggctccagacggatctctaaggttcccagctctcagggttgactctgttccatcctctgtgcaaaatcctcccgtgcttccctttggccctctgtgctcttgtctggttttccccagaaactctcaccctcactccatctcccactgcggtctaacaaatctcctttcgtctctcagaacgggtcttgcaggcagtttgggtatgtcattcattttccttagtgtaaaactagcacgttgcccgcttcccttcacattagaaaacaagatcagcctgtgcaacatggtgaaacctcatctctaccaacaaaacaaaaaaacacaaaaattagccaggtgtggtggtgcatccctatactcccagcaactcagggggctgaggtgggagaatggcttgagcctgggaggcagaggttgcagtgagctgagatcacaccactgcactctagctcgggtgacgaagcctgactttgtctcaaaaaatacagggatgaatatgtcaattaccctgatttgatcatagcacgttgtatacatgtactgcaatattgctgtccaccccataaatatgtacaattctgtatacatttttaaaatcataaaaataagataatgcaccgtctccacccctctcatatttactttctgaaggaaatgttaggtcttctcaaggtaaagttctatatttattatagcgtttaggcatttcttgaccatctaatgagtgtaaaactgtaccactgggccaagtgcagtggatcatgtctgtaatcctagcactgtgggaggccaaggcaggaggatcgcttgagcccaggagttcaagaccagcctgggcaacatagtgagaccccatctctacttaaaataaagaagataaaaattgttttaaaa

SEQ ID NO: 49 - DNA, 2264 bp, Homo sapiens
acagagctcaggacagggctgaggaaccatgtctccatccccgaccgccctcttctgtcttgggctgtgtctggggcgtgtgccagcgcagagtggaccgctccccaagccctccctccaggctctgcccagctccctggtgcccctggagaagccagtgaccctccggtgccagggacctccgggcgtggacctgtaccgcctggagaagctgagttccagcaggtaccaggatcaggcagtcctcttcatcccggccatgaagagaagtctggctggacgctaccgctgctcctaccagaacggaagcctctggtccctgcccagcgaccagctggagctcgttgccacgggagtttttgccaaaccctcgctctcagcccagcccggcccggcggtgtcgtcaggaggggacgtaaccctacagtgtcagactcggtatggctttgaccaatttgctctgtacaaggaaggggaccctgcgccctacaagaatcccgagagatggtacagggctagttttcccatcatcacggtgaccgccgcccacagcggaacctaccgatgctacagcttctccagcagggacccatacctgtggtcagcccccagcgaccccctggagcttgtggtcacaggaacctctgtgacccccagccggttaccaacagaaccaccttccccggtagcagaattctcagaagccaccgctgaactgaccgtctcattcacaaacgaagtcttcacaactgagacttctaggagtatcaccgccagtccaaaggagtcagactctccagctggtcctgcccgccagtactacaccaagggcaacctggtccggatatgcctcggggctgtgatcctaataatcctggcggggtttctggcagaggactggcacagccggaggaagcgcctgcggcacaggggcagggctgtgcagaggccgcttccgcccctcccgcccctcccgcagacccggaaatcacacgggggtcaggatggaggccgacaggatgttcacagccgcgggttatgttcatgaccgctgaaccccaggcacggtcgtatccaagggagggatcatggcatgggaggcgactcaaagactggcgtgtgtggagcgtggaagcaggagggcagaggctacagctgtggaaacgaggccatgctgcctcctcctggtgttccatcagggagccgttcggccagtgtctgtctgtctgtctgcctctctgtctgagggcaccctccatttgggatggaaggaatctgtggagaccccatcctcctccctgcacactgtggatgacatggtaccctggctggaccacatactggcctctttcttcaacctctctaatatgggctccagacggatctctaaggttcccagctctcagggttgactctgttccatcctctgtgcaaaatcctcccgtgcttccctttggccctctgtgctcttgtctggttttccccagaaactctcaccctcactccatctcccactgcggtctaacaaatctcctttcgtctctcagaacgggtcttgcaggcagtttgggtatgtcattcattttccttagtgtaaaactagcacgttgcccgcttcccttcacattagaaaacaagatcagcctgtgcaacatggtgaaacctcatctctaccaacaaaacaaaaaaacacaaaaattagccaggtgtggtggtgcatccctatactcccagcaactcagggggctgaggtgggagaatggcttgagcctgggaggcagaggttgcagtgagctgagatcacaccactgcactctagctcgggtgacgaagcctgactttgtctcaaaaaatacagggatgaatatgtcaattaccctgatttgatcatagcacgttgtatacatgtactgcaatattgctgtccaccccataaatatgtacaattctgtatacatttttaaaatcataaaaataagataatgcaccgtctccacccctctcatatttactttctgaaggaaatgttaggtcttctcaaggtaaagttctatatttattatagcgtttaggcatttcttgaccatctaatgagtgtaaaactgtaccactgggccaagtgcagtggatcatgtctgtaatcctagcactgtgggaggccaaggcaggaggatcgcttgagcccaggagttcaagaccagcctgggcaacatagtgagaccccatctctacttaaaataaagaagataaaaattgttttaaaa

SEQ ID NO: 50 - DNA, 845 bp, Homo sapiens
ctggactcagtgacttcagacacagaagtctgtccatggctccttatcacatccgcaaataccaggagagcgaccgcaagtcggtcgtgggcttgctctcccgggggatggccgaacacgccccagccaccttccggcgattactgaagctgcctcgaaccctcatactcttacttgggggggcccttgccctactcctggtctctggctcctggattctggccctcgtgttcagcctcagcctccttcctgccctgtggttccttgccaaaaaaccctggacgcggtatgtagacatagcattgcgcacagacatgtctgacatcaccaaatcctacctgagtgagtgtggctcctgcttctgggtgggtgaatctgaagagaaggtggtgggcacagtaggagctctgcccgttgatgatcccaccttgagggagaagcggttgcagctgtttcatctctctgtggacaatgagcaccgtggtcaggggatagcaaaagccctggtcaggactgtcctccagtttgcccgggaccagggctacagtgaagttgtcctggacaccagcaacatccagctctctgccatgggcctctaccagagcttgggcttcaagaagacgggccagtccttcttccacgtgtgggccaggctggtggatcttcatacagttcatttcatctatcacctcccttctgctcaggcagggcgtctatgatttctttccttctgtattggtcagaatagaatccattcggctgtagcagcaagcaatccccaacctctgactgcaatgacctttctgtgcaataaaagcttattgtccattaaaaaaaaaaaaaaa

SEQ ID NO: 51 - DNA, 5064 bp, Homo sapiens
ggcaaaagaaataatgcacctgactttaccaggggggaacaaccagccgagtagaacaaggaacagatgtaaagggaataaaaggagagagaaaaagagatgagattcgtttaaagaaatccaggggcagaagaggtggctgccgcggcagaggcagctagagcttacttccctgtctgcgtgagctgcaggcagaggacgctttcaccagttgcagatgtaacctcgggaattcctgggccgtcggtttgtttgccaaacaaagtcttttcttctctggctcagacactgaagaggctcctggatttttctgcgatcctgccacaagctggcagttacccgagagccttcccaaggagctggaggagaaatgagcccttgtgggcggaagatgggcgaagggcgtcagcagcggcgggctccggtcgggaagctccttctgctccccgggaggagagatacaccccatgggcggtcaggcagcagcggcgccaggacgcagcgctccctgctctggctcttggtgcacgtgtggctgtgggcggcctcgggctcctctgcccagttgttcaacctcaccctttccgtagatgaggggcttcccccggacacgctggtaggtgacatccgcgccgggctgccggccgcgcagcagcaggaggggagcggcttctttctgtcggaggactccgatgactccccgctgctggacgacttccacgtgcacccggacaccggcatcatccgcactgcgcggcgcctggaccgcgagcggcgggaccactacagcttcgtcgccgccacgctgctgggcgctgtggtgcaggtggagattcgcgtcaacgacgtgaatgaccactcgccccgctttcccctcgactccctgcaactcgacgtctccgagctcagcccgccagggaccgccttccgcctgccagttgcccacgatccggacgccggactgttcagcactcagggctacaccctggtgcaaccgtccgacctgcccaaggaccccgcaggcccgttcttccagttgcgctaccggactccggggccactaccgtcaccgcttttgccaggctcctcgtcacccctggagcctctagatctggtgctgctgcggcgcttggaccgagaggaggcggcggcgcaccggctgcagatcgaggcatgggacggcggccgaccccggcgcaccggcctcctgagcgtggagctgcgcgtgctggatgagaacgacaacccgccggtctttgagcaggacgagtaccgcgccgcggtgcgcgaggacgcccagccgggcgccgaggtctgtcgcgtgcgcgccaccgaccgcgacctggggcccaatggcttcgtgcgctacagcgtccgcgcccggcaagtgcctggggcgggtagcggcggcggggcactgggcgacgcggcctacttcgcggtggaggagctgagcggcgtggtgcgagtgtggagacctctggaccgcgaggcacaggcctggcaccagttggtggtggaggcccgcgatggaggcgccgagcctgaggttgccacggtgcgcgtgtccatcgccgtgctggacgtgaatgacaaccggccagcaattcacgtgctctttctcacagagggaggcgtcgcccgtgtctctgaaggcgcccgaccgggcgactacgtggctcgcgtctcggtgtctgacgcggacggtgactgggagaaggaagatgaggccacaggggagcttggtgtgggtcttggagacgggagcatctctctgtccttggaaggcggagagggagacttcgcgttgctacccggcggccccccaggggtatttttcctttgcgtggaggggcccctggacagagagagccgcgatctgtatgagttactactggtggccacggacgcggggtccccgccgctgagcacggaggagacgctgctactccgggtcgctgacctcaatgaccaaccacctctcttcagccaacagcattacaaggcctcagtgtccgaggccgcggcccctggcactgtagtcatgtgggtcagcgcctccgatgccgacgaggcaggcagtgatcacgcctggctgcgctacactgtagtccaactctcggctccctgcaatctcggctccctgcaatcaaagatggtccacaccgcagagtgtggaccatcttttgccattgattccgaaagcggtgcgatcagcactatccggactctagaccgagaggtccaggaggcggtggagctgaaagtggtggcccaggacctcggagagcccccactctctgccacctgcctggtgagcatcaccgtagatgatgtgaatgacaatgagcccatcttctggaggcaggtgtacaatgccaccattgcagagcatgccccggttggacactgctttctgcaggtgacagcctctgatgcagattcaggactctatggctttattgaatattctctttatgatggattcctgagctatgaagcacctcaggcattccggatcgaccctcatgatgggcaaatctgtgtttctcaagatatcgacagggaaagggatccagctacctatgatctcctggtggaagctaaggatgggggtgggctaagtgcccaagcctttgttcgtgtggacctggaggacgtgaatgataatcatcctgtgtttaacccatcaacctatgtgacgagcatcagtgatgagacccagccaggcaccgagatcatcaatgttcttgccactgaccaggactctgggatatatgggacagtggcttatgagcttattccaggaaacgtgtcgtccctttttaccattgactccaccacaggaattatttacttaacattacctcttagtcatttggaatctaccacactttcgttgatggtctctgctcaagacggtggtgggctcacagctgtcattaatgccgatgtcaccatacacattttccagacaactctggcacctgctgagtttgaaaggcctaagtacactttcttagtttatgaagatgtgcctgaagatagtcccattggaacagtgaaagcaagagagcccttgaactcctcagaaccaatcttttacaggatttcttctggtgatctcggcggaaagttctccattcacccgcggctgggcactattcgcacccggaagcccctggatcacgagacgcagcccgtggttgtgctcacggtgcaggcgcagctcggcagcgccccagcctgcagcagcaccgaggtcaacataacagtcatggatgtcaatgacaaccacccagcgttcctcaggacctcggatgagattagaatatcccagaccacgccccctggcacagccttgtacctcgcacgtgcggaagacagagacagtgggcggaacggactcatccggtactccatcgccagcccgcagccaggcgtctttgccatcgacagagccctgggggtgctgttcctcaacggcagcctgggcgcgggcgagcagcgggagctcacgctgactctcagggccgaggaccaaggcgtgcatcctcaggcagccctgctggtgctgacagtcgttatcgagaaacgcgaacacagcccatcctggactttcgaacatttggtctatcaagtggaagtcagtgagtctctctcaccgatgacacaaatgctgcaaacacaggcgcacccacttggcccccagcgtgcagcctcgcctcttaggtactcgctggaacccagcgtagactctgctatgtttggaatccgcccttacacgggctggatttatttgcggcgacagtttgactatgaatccacccaaacatataattttagagtgtttgcttggatccccgaggacggattcttgcaaaatgtgagcactacagtcattgttcgtgtctgggatgagaatgacaattcccccaccttcttgcatgatgtgttgtttttgaaagtcgaagagagccctgttccccaaggggtaataggcaaaattacagctattgacatggactctggaaagaatggacagctattatatttccttttgtctgatggaaaattcttcaagatgaatcctaatacaggagagttaatcaattgggtggcactggatcgtgagcaccgggggcaccatgagatgactgtgctagtgacagaccgcggctccccaccacgaaacgccaccatggcggtttacgtctcagttactgacatcaatgataacaggcccttcttcccccagtgtctccctggaaaggagttacacgtgaaggttctggaaggtcaaccagtaaatatgttggttacaactgtgtttgcaaaggatcctgatgaaggaaataatgcagaagttacatactcagtatcttcagctagacctatgcctctgaagggaaaaacagcatttgggaagcagtcgtgcaaaaaacaaacaaacaaacaaacaaacaaaatcctgacctgaatctggtcagttctctagatctgcctcccaatttaaggaaaacataagaatagaggaacatattatgctacacgttggagatgcaacagcaaatctagatcatggaaaatgtcaggatacaagttccagtttattcaacaaataaattgcaaggacaaatagagagatgggtggcaggaatccatagattaaagaaatatgcaatatatggactttattttgatcttaatgtaaacaagaaaaataaagagtatttatgggatggttgaaaatttgaaaacttactgaatatttggtgatactgtgaaccattattaatttttaaggtataatatggtactgtgatgattgtgttaaaatatttattttttaaagatgcattttgaaatatatacagaagaaataatatgacttctggaacttacttcaaaaaaaatgggagaagcgaagtatatacatggggaatagatgaaataagattggccatgagctgatcattgttgaagctaggtgatggactcgtgaaagtttattataccattttgtccacttttttgtatgcattttccataataaaaattttt

SEQ ID NO: 52 - DNA, 2553 bp, Homo sapiens
agatccccatcctctccttgtgtgtgcgcgcttcatataatctcctcctttttggcaaaagaaataatgcacctgactttaccaggggggaacaaccagccgagtagaacaaggaacagatgtaaagggaataaaaggagagagaaaaagagatgagattcgtttaaagaaatccaggggcagaagaggtggctgccgcggcagaggcagctagagcttacttccctgtctgcgtgagctgcaggcagaggacgctttcaccagttgcagatgtaacctcgggaattcctgggccgtcggtttgtttgccaaacaaagtcttttcttctctggctcagacactgaagaggctcctggatttttctgcgatcctgccacaagctggcagttacccgagagccttcccaaggagctggaggagaaatgagcccttgtgggcggaagatgggcgaagggcgtcagcagcggcgggctccggtcgggaagctccttctgctccccgggaggagagatacaccccatgggcggtcaggcagcagcggcgccaggacgcagcgctccctgctctggctcttggtgcacgtgtggctgtgggcggcctcgggctcctctgcccagttgttcaacctcaccctttccgtagatgaggggcttcccccggacacgctggtaggtgacatccgcgccgggctgccggccgcgcagcagcaggaggggagcggcttctttctgtcggaggactccgatgactccccgctgctggacgacttccacgtgcacccggacaccggcatcatccgcactgcgcggcgcctggaccgcgagcggcgggaccactacagcttcgtcgccgccacgctgctgggcgctgtggtgcaggtggagattcgcgtcaacgacgtgaatgaccactcgccccgctttcccctcgactccctgcaactcgacgtctccgagctcagcccgccagggaccgccttccgcctgccagttgcccacgatccggacgccggactgttcagcactcagggctacaccctggtgcaaccgtccgacctgcccaaggaccccgcaggcccgttcttccagttgcgctaccggactccggggccactaccgtcaccgcttttgccaggctcctcgtcacccctggagcctctagatctggtgctgctgcggcgcttggaccgagaggaggcggcggcgcaccggctgcagatcgaggcatgggacggcggccgaccccggcgcaccggcctcctgagcgtggagctgcgcgtgctggatgagaacgacaacccgccggtctttgagcaggacgagtaccgcgccgcggtgcgcgaggacgcccagccgggcgccgaggtctgtcgcgtgcgcgccaccgaccgcgacctggggcccaatggcttcgtgcgctacagcgtccgcgcccggcaagtgcctggggcgggtagcggcggcggggcactgggcgacgcggcctacttcgcggtggaggagctgagcggcgtggtgcgagtgtggagacctctggaccgcgaggcacaggcctggcaccagttggtggtggaggcccgcgatggaggcgccgagcctgaggttgccacggtgcgcgtgtccatcgccgtgctggacgtgaatgacaaccggccagcaattcacgtgctctttctcacagagggaggcgtcgcccgtgtctctgaaggcgcccgaccgggcgactacgtggctcgcgtctcggtgtctgacgcggacggtgactgggagaaggaagatgaggccacaggggagcttggtgtgggtcttggagacgggagcatctctctgtccttggaaggcggagagggagacttcgcgttgctacccggcggccccccaggggtatttttcctttgcgtggaggggcccctggacagagagagccgcgatctgtatgagttactactggtggccacggacgcggggtccccgccgctgagcacggaggagacgctgctactccgggtcgctgacctcaatgaccaaccacctctcttcagccaacagcattacaaggcctcagtgtccgaggccgcggcccctggcactgtagtcatgtgggtcagcgcctccgatgccgacgaggcaggcagtgatcacgcctggctgcgctacactgtagtccaactctcggctccctgcaatctcggctccctgcaatcaaagatggtccacaccgcagagtgtggaccatcttttgccattgattccgaaagcggtgcgatcagcactatccggactctagaccgagaggtccaggaggcggtggagctgaaagtggtggcccaggacctcggagagcccccactctctgccacctgcctggtgagcatcaccgtagatgatgtgaatgacaatgagcccatcttctggaggcaggtgtacaatgccaccattgcagagcatgccccggttggacactgctttctgcagcttatatctgctcaagttgcctttgtcaaaatcaaacaaaaacaaaaggaaatacaggaaaaacaaaatcttgcctag

SEQ ID NO: 53 - DNA, 1906 bp, Homo sapiens
tttccgggaagatggcggcgcacaagtcaggtccggcacatgtttccgcggagcggacccagcaatgacgaggtcaagagtcgtgggatgaagtttgctgaggagcagctgctaaagcatggatggactcaaggcaaaggcctcggccggaaggagaatggtatcactcaggctctcagggtgacactgaagcaagacactcatggggtaggacatgaccctgccaaggagttcacaaaccactggtggaatgagctcttcaacaagactgcggccaacttggtagtggaaactgggcaggatggagtacagataaggagcctttctaaggagaccacccgttataatcatcccaagcccaacttgctgtatcagaagtttgtgaagatggctacattgacttcaggtggagagaagccaaacaaagacttggagagctgcagtgatgacgacaaccaggggtccaagtccccaaagattctgactgatgagatgctgctccaagcctgtgaggggcgaacagcacacaaggctgcccgtcttgggatcacaatgaaggccaagcttgctcgcctagaggcccaggagcaggccttcctggctcgtctcaaaggccaggaccctggggcccctcaactgcagtcagagagcaagccccccaaaaaaaagaaaaagaaaaggaggcagaaagaggaggaagaagctacagcatctgaaaggaatgatgcagatgagaagcacccagaacatgctgagcagaacatcagaaaaagcaagaagaagaaaaggcgacatcaagaaggaaaggtctcagatgaaagagagggtacaactaaagggaatgagaaggaggacgctgcaggaacaagtgggcttggggaattgaatagcagagagcaaaccaatcagtccctcaggaaagggaagaaaaagaagaggtggcaccatgaagaggagaagatgggggtcttggaggaaggaggaaaaggcaaggaggctgcaggcagtgtcaggacagaggaggtagagagcagggcatatgctgacccatgcagccgaagaaagaagaggcagcaacaggaggaggaggacttgaacctagaagatagaggtgaggaaacttttaggtggtggaaccagggaagcagagagcagagcatgcagtgatggaagaagcaggaaaagcaagaagaaaagacagcagcatcaagaggaggaggacatcttggatgtaagggatgagaaggatggcggggctagggaagcagagagcagagcacacactggctcaagcagcagaggtaagaggaagaggcagcagcatcccaagaaggaaagagctggagtcagcactgtccagaaagccaaaaagaaacagaagaagagagactaaaggtctggtaaaggtagggctcaattgattgattttcaggagttgaagcctcaaagaccagggttgatgcaggtctgcaggtcttctgcacccccctcaatgaggagtccctcccagaaaggaaactgatctctgggacgtcagctgctgagaggagcaagcggtagtaccaccccttagttgagggagtcagcacagtcctttctgcagcttctaacccaggaccatgaactcaggtgcctagagaagccaggcagctaaaggacaaggaatgctgggggctgtgggaacaggaatgcagataccctttgaaggagcattcctgctaaaagaagctgaaaatgtagacctatgtgaagtgctctgatttctaaatattgtgaaggttaagaaaaacataaatttaggtctatgggctagatttagcccacagttgccagtttctagcgctaccaaatgaatgaataaacatgagcttgcgctcctagcctagagataaaaaaaaaaaaaaaa

SEQ ID NO: 54 - DNA, 1980 bp, Homo sapiens
tttccgggaagatggcggcgcacaagtcaggtccggcacatgtttccgcggagcggacccagcaatgacggatgatatcacctcttcttctctggtgagagtctgaggatagagacttttttctcaccatgaatgtcaccccagaggtcaagagtcgtgggatgaagtttgctgaggagcagctgctaaagcatggatggactcaaggcaaaggcctcggccggaaggagaatggtatcactcaggctctcagggtgacactgaagcaagacactcatggggtaggacatgaccctgccaaggagttcacaaaccactggtggaatgagctcttcaacaagactgcggccaacttggtagtggaaactgggcaggatggagtacagataaggagcctttctaaggagaccacccgttataatcatcccaagcccaacttgctgtatcagaagtttgtgaagatggctacattgacttcaggtggagagaagccaaacaaagacttggagagctgcagtgatgacgacaaccaggggtccaagtccccaaagattctgactgatgagatgctgctccaagcctgtgaggggcgaacagcacacaaggctgcccgtcttgggatcacaatgaaggccaagcttgctcgcctagaggcccaggagcaggccttcctggctcgtctcaaaggccaggaccctggggcccctcaactgcagtcagagagcaagccccccaaaaaaaagaaaaagaaaaggaggcagaaagaggaggaagaagctacagcatctgaaaggaatgatgcagatgagaagcacccagaacatgctgagcagaacatcagaaaaagcaagaagaagaaaaggcgacatcaagaaggaaaggtctcagatgaaagagagggtacaactaaagggaatgagaaggaggacgctgcaggaacaagtgggcttggggaattgaatagcagagagcaaaccaatcagtccctcaggaaagggaagaaaaagaagaggtggcaccatgaagaggagaagatgggggtcttggaggaaggaggaaaaggcaaggaggctgcaggcagtgtcaggacagaggaggtagagagcagggcatatgctgacccatgcagccgaagaaagaagaggcagcaacaggaggaggaggacttgaacctagaagatagaggtgaggaaacttttaggtggtggaaccagggaagcagagagcagagcatgcagtgatggaagaagcaggaaaagcaagaagaaaagacagcagcatcaagaggaggaggacatcttggatgtaagggatgagaaggatggcggggctagggaagcagagagcagagcacacactggctcaagcagcagaggtaagaggaagaggcagcagcatcccaagaaggaaagagctggagtcagcactgtccagaaagccaaaaagaaacagaagaagagagactaaaggtctggtaaaggtagggctcaattgattgattttcaggagttgaagcctcaaagaccagggttgatgcaggtctgcaggtcttctgcacccccctcaatgaggagtccctcccagaaaggaaactgatctctgggacgtcagctgctgagaggagcaagcggtagtaccaccccttagttgagggagtcagcacagtcctttctgcagcttctaacccaggaccatgaactcaggtgcctagagaagccaggcagctaaaggacaaggaatgctgggggctgtgggaacaggaatgcagataccctttgaaggagcattcctgctaaaagaagctgaaaatgtagacctatgtgaagtgctctgatttctaaatattgtgaaggttaagaaaaacataaatttaggtctatgggctagatttagcccacagttgccagtttctagcgctaccaaatgaatgaataaacatgagcttgcgctcctagcctagagataaaaaaaaaaaaaaaa

SEQ ID NO: 55 - DNA, 3291 bp, Homo sapiens
agctgagggagccgcaatgtctcttgacagcggcggcggcgcagccggttccgggttcggcgcggggcggggatgtgaatcccgatggagcggcccgaggaaggcaagcagtcgccgccgccgcagccctggggacggctcctgcgtctgggcgcggaggagggcgagccgcacgtcctcctgaggaagcgggagtggaccatcgggcggagacgaggttgcgacctttccttccccagcaataaactggtctctggagatcactgtagaattgtagtggatgaaaaatcaggtcaggtgacactggaagataccagcaccagtggaacagtgattaacaagctgaaggttgttaagaagcagacatgccctttacagactggggatgtcatctacttggtgtacaggaagaatgaaccggaacacaacgtggcatacctctatgaatctttaagtgaaaagcaaggcatgacacaagaatcctttgaagctaacaaggaaaatgtgttccatgggaccaaagatacctcaggtgcaggtgcagggcgaggggccgatccccgggtccctccgtcgtcgcccgccactcaggtgtgctttgaggaaccacagccatcaacatcgacgtcagacctcttccccacagcctcggcctcttccacggagccttctcctgcagggcgagagcgttcctccagttgtgggtctgggggtggtggcatctcccctaaaggaagtggtccctctgtggcaagtgatgaagtctccagctttgcctcagctctcccagacagaaagactgcgtccttttcgtcgttggaaccccaggatcaggaggatttggagcccgtgaagaagaaaatgagaggagatggggaccttgacctgaacgggcagttgttggtcgcacaaccgcgtagaaatgcccaaaccgtccacgaggacgtcagagcagcggctgggaagccagacaagatggaggagacgctgacatgcatcatctgccaggacctgctgcacgactgcgtgagtttgcagccctgcatgcacacgttctgcgcggcttgctactcgggctggatggagcgctcgtccctgtgtcctacctgccgctgtcccgtggagcggatctgtaaaaaccacatcctcaacaacctcgtggaagcatacctcatccagcatccagacaagagtcgcagtgaagaagatgtgcaaagtatggatgccaggaataaaatcactcaagacatgctgcagcccaaagtcaggcggtctttttctgatgaagaagggagttcagaggacctgctggagctgtcagacgttgacagtgagtcctcagacattagccagccatacgtcgtgtgccggcagtgtcctgagtacagaaggcaggcggcgcagcctccccactgcccagcacccgagggcgagccaggagccccacaggccctgggggatgcaccctccacgtccgtcagcctgacgacagcagtccaggattacgtgtgccctctgcaaggaagccacgccctgtgcacctgctgcttccagcccatgcccgaccggagagcggagcgcgagcaggacccgcgtgtcgcccctcagcagtgtgcggtctgcctgcagcctttctgccacctgtactggggctgcacccggaccggctgctacggctgcctggccccgttttgtgagctcaacctgggtgacaagtgtctggacggcgtgctgaacaacaacagctacgagtcagacatcctgaagaattacctggcaaccagaggtttgacatggaaaaacatgttgaccgagagcctcgtggctctccagcggggagtgtttctgctgtctgattacagagtcacgggagacaccgttctgtgttactgctgtggcctgcgcagcttccgtgagctgacctatcagtatcggcagaacattcctgcttccgagttgccagtggccgtaacatcccgtcctgactgctactggggccgtaactgccgcactcaggtgaaagctcaccacgccatgaaattcaatcatatctgtgaacagacaaggttcaaaaactaagcatccagaggccctgagcagctttcagcactggaggtgaagagagcgtgtttttaaaatacagagacaagcacgtcaaggtgttttcacagccccctgagggaagggacgcagggtctccgacaggtgctctggggtgactcttctgtggagctttaccctctgagtgagaccctccccagagccccgggggccgcagcccgccctcctggtgagcgctgggcagggctcgtggtggcatcagcagcagagacgaagcctttctgtaacatgcggccgtcccgccgagaggggcagttttgctcttttgtacattttccgaaactacagttaaagcagaagtctgtttttaggaaaagtttcaagggagaagggcaagtttatcaaaaacattgtttcaggagaagggagcataagtttacagcctacaggacgtacacaatatcctgctgctgggaaaaccacagcattttatctattttttattttaataggtttggtgcttatcttctaataagatttaaatgtcacaaactgtagcacaaataatataatttataatttacaaattgactaaaattgggtatagtatggtatttgaaagaataagcatatgcttctgtttattaaaaaaagaaaccttccaatgtccaaaactgctaaccctcgacgtggccgccaagttagtcgctccttgctaaccggtgagtgaccgcggccccgagcctggggctggacgcaggtcccaggacatgctgctcccttgtgtgagtgaccgcggccccgagcctggggctggacgcaggtcccaggacgtgctgctcccttgtgtgagtgaccacggccccaagcccagggctggaggcaggtcccaggacgcgccgctccctcatgctgcccgggcccttcctccaagaccctacagagcctgaggggcaccttggcttccgcctgtgctagctttgccatgtcatctggaataatacttgaaattttgatttttggaaaaaaaagttttttatcttttgttgaaatcacctgttatccttgtttgtaaactgataacttttttgcttcttctcaggaatacagttttcaactgttgtcttgctcttgatagaaactgagaagcagcaatctgtatttgtggaggaaagtcctctcttttgcatattctaataaatgagccgcgtttgctcctcaaaaaaaaaa

SEQ ID NO: 56 - DNA, 3288 bp, Homo sapiens
agctgagggagccgcaatgtctcttgacagcggcggcggcgcagccggttccgggttcggcgcggggcggggatgtgaatcccgatggagcggcccgaggaaggcaagcagtcgccgccgccgcagccctggggacggctcctgcgtctgggcgcggaggagggcgagccgcacgtcctcctgaggaagcgggagtggaccatcgggcggagacgaggttgcgacctttccttccccagcaataaactggtctctggagatcactgtagaattgtagtggatgaaaaatcaggtcaggtgacactggaagataccagcaccagtggaacagtgattaacaagctgaaggttgttaagaagcagacatgccctttacagactggggatgtcatctacttggtgtacaggaagaatgaaccggaacacaacgtggcatacctctatgaatctttaagtgaaaagcaaggcatgacacaagaatcctttgaagctaacaaggaaaatgtgttccatgggaccaaagatacctcaggtgcaggtgcagggcgaggggccgatccccgggtccctccgtcgtcgcccgccactcaggtgtgctttgaggaaccacagccatcaacatcgacgtcagacctcttccccacagcctcggcctcttccacggagccttctcctgcagggcgagagcgttcctccagttgtgggtctgggggtggtggcatctcccctaaaggaagtggtccctctgtggcaagtgatgaagtctccagctttgcctcagctctcccagacagaaagactgcgtccttttcgtcgttggaaccccaggatcaggaggatttggagcccgtgaagaagaaaatgagaggagatggggaccttgacctgaacgggcagttgttggtcgcacaaccgcgtagaaatgcccaaaccgtccacgaggacgtcagagcagcggctgggaagccagacaagatggaggagacgctgacatgcatcatctgccaggacctgctgcacgactgcgtgagtttgcagccctgcatgcacacgttctgcgcggcttgctactcgggctggatggagcgctcgtccctgtgtcctacctgccgctgtcccgtggagcggatctgtaaaaaccacatcctcaacaacctcgtggaagcatacctcatccagcatccagacaagagtcgcagtgaagaagatgtgcaaagtatggatgccaggaataaaatcactcaagacatgctgcagcccaaagtcaggcggtctttttctgatgaagaagggagttcagaggacctgctggagctgtcagacgttgacagtgagtcctcagacattagccagccatacgtcgtgtgccggcagtgtcctgagtacagaaggcaggcggcgcagcctccccactgcccagcacccgagggcgagccaggagccccacaggccctgggggatgcaccctccacgtccgtcagcctgacgacagtccaggattacgtgtgccctctgcaaggaagccacgccctgtgcacctgctgcttccagcccatgcccgaccggagagcggagcgcgagcaggacccgcgtgtcgcccctcagcagtgtgcggtctgcctgcagcctttctgccacctgtactggggctgcacccggaccggctgctacggctgcctggccccgttttgtgagctcaacctgggtgacaagtgtctggacggcgtgctgaacaacaacagctacgagtcagacatcctgaagaattacctggcaaccagaggtttgacatggaaaaacatgttgaccgagagcctcgtggctctccagcggggagtgtttctgctgtctgattacagagtcacgggagacaccgttctgtgttactgctgtggcctgcgcagcttccgtgagctgacctatcagtatcggcagaacattcctgcttccgagttgccagtggccgtaacatcccgtcctgactgctactggggccgtaactgccgcactcaggtgaaagctcaccacgccatgaaattcaatcatatctgtgaacagacaaggttcaaaaactaagcatccagaggccctgagcagctttcagcactggaggtgaagagagcgtgtttttaaaatacagagacaagcacgtcaaggtgttttcacagccccctgagggaagggacgcagggtctccgacaggtgctctggggtgactcttctgtggagctttaccctctgagtgagaccctccccagagccccgggggccgcagcccgccctcctggtgagcgctgggcagggctcgtggtggcatcagcagcagagacgaagcctttctgtaacatgcggccgtcccgccgagaggggcagttttgctcttttgtacattttccgaaactacagttaaagcagaagtctgtttttaggaaaagtttcaagggagaagggcaagtttatcaaaaacattgtttcaggagaagggagcataagtttacagcctacaggacgtacacaatatcctgctgctgggaaaaccacagcattttatctattttttattttaataggtttggtgcttatcttctaataagatttaaatgtcacaaactgtagcacaaataatataatttataatttacaaattgactaaaattgggtatagtatggtatttgaaagaataagcatatgcttctgtttattaaaaaaagaaaccttccaatgtccaaaactgctaaccctcgacgtggccgccaagttagtcgctccttgctaaccggtgagtgaccgcggccccgagcctggggctggacgcaggtcccaggacatgctgctcccttgtgtgagtgaccgcggccccgagcctggggctggacgcaggtcccaggacgtgctgctcccttgtgtgagtgaccacggccccaagcccagggctggaggcaggtcccaggacgcgccgctccctcatgctgcccgggcccttcctccaagaccctacagagcctgaggggcaccttggcttccgcctgtgctagctttgccatgtcatctggaataatacttgaaattttgatttttggaaaaaaaagttttttatcttttgttgaaatcacctgttatccttgtttgtaaactgataacttttttgcttcttctcaggaatacagttttcaactgttgtcttgctcttgatagaaactgagaagcagcaatctgtatttgtggaggaaagtcctctcttttgcatattctaataaatgagccgcgtttgctcctcaaaaaaaaaa

SEQ ID NO: 57 - DNA, 3255 bp, Homo sapiens
agctgagggagccgcaatgtctcttgacagcggcggcggcgcagccggttccgggttcggcgcggggcggggatgtgaatcccgatggagcggcccgaggaaggcaagcagtcgccgccgccgcagccctggggacggctcctgcgtctgggcgcggaggagggcgagccgcacgtcctcctgaggaagcgggagtggaccatcgggcggagacgaggttgcgacctttccttccccagcaataaactggtctctggagatcactgtagaattgtagtggatgaaaaatcaggtcaggtgacactggaagataccagcaccagtggaacagtgattaacaagctgaaggttgttaagaagcagacatgccctttacagactggggatgtcatctacttggtgtacaggaagaatgaaccggaacacaacgtggcatacctctatgaatctttaagtgaaaagcaaggcatgacacaagaatcctttgatacctcaggtgcaggtgcagggcgaggggccgatccccgggtccctccgtcgtcgcccgccactcaggtgtgctttgaggaaccacagccatcaacatcgacgtcagacctcttccccacagcctcggcctcttccacggagccttctcctgcagggcgagagcgttcctccagttgtgggtctgggggtggtggcatctcccctaaaggaagtggtccctctgtggcaagtgatgaagtctccagctttgcctcagctctcccagacagaaagactgcgtccttttcgtcgttggaaccccaggatcaggaggatttggagcccgtgaagaagaaaatgagaggagatggggaccttgacctgaacgggcagttgttggtcgcacaaccgcgtagaaatgcccaaaccgtccacgaggacgtcagagcagcggctgggaagccagacaagatggaggagacgctgacatgcatcatctgccaggacctgctgcacgactgcgtgagtttgcagccctgcatgcacacgttctgcgcggcttgctactcgggctggatggagcgctcgtccctgtgtcctacctgccgctgtcccgtggagcggatctgtaaaaaccacatcctcaacaacctcgtggaagcatacctcatccagcatccagacaagagtcgcagtgaagaagatgtgcaaagtatggatgccaggaataaaatcactcaagacatgctgcagcccaaagtcaggcggtctttttctgatgaagaagggagttcagaggacctgctggagctgtcagacgttgacagtgagtcctcagacattagccagccatacgtcgtgtgccggcagtgtcctgagtacagaaggcaggcggcgcagcctccccactgcccagcacccgagggcgagccaggagccccacaggccctgggggatgcaccctccacgtccgtcagcctgacgacagcagtccaggattacgtgtgccctctgcaaggaagccacgccctgtgcacctgctgcttccagcccatgcccgaccggagagcggagcgcgagcaggacccgcgtgtcgcccctcagcagtgtgcggtctgcctgcagcctttctgccacctgtactggggctgcacccggaccggctgctacggctgcctggccccgttttgtgagctcaacctgggtgacaagtgtctggacggcgtgctgaacaacaacagctacgagtcagacatcctgaagaattacctggcaaccagaggtttgacatggaaaaacatgttgaccgagagcctcgtggctctccagcggggagtgtttctgctgtctgattacagagtcacgggagacaccgttctgtgttactgctgtggcctgcgcagcttccgtgagctgacctatcagtatcggcagaacattcctgcttccgagttgccagtggccgtaacatcccgtcctgactgctactggggccgtaactgccgcactcaggtgaaagctcaccacgccatgaaattcaatcatatctgtgaacagacaaggttcaaaaactaagcatccagaggccctgagcagctttcagcactggaggtgaagagagcgtgtttttaaaatacagagacaagcacgtcaaggtgttttcacagccccctgagggaagggacgcagggtctccgacaggtgctctggggtgactcttctgtggagctttaccctctgagtgagaccctccccagagccccgggggccgcagcccgccctcctggtgagcgctgggcagggctcgtggtggcatcagcagcagagacgaagcctttctgtaacatgcggccgtcccgccgagaggggcagttttgctcttttgtacattttccgaaactacagttaaagcagaagtctgtttttaggaaaagtttcaagggagaagggcaagtttatcaaaaacattgtttcaggagaagggagcataagtttacagcctacaggacgtacacaatatcctgctgctgggaaaaccacagcattttatctattttttattttaataggtttggtgcttatcttctaataagatttaaatgtcacaaactgtagcacaaataatataatttataatttacaaattgactaaaattgggtatagtatggtatttgaaagaataagcatatgcttctgtttattaaaaaaagaaaccttccaatgtccaaaactgctaaccctcgacgtggccgccaagttagtcgctccttgctaaccggtgagtgaccgcggccccgagcctggggctggacgcaggtcccaggacatgctgctcccttgtgtgagtgaccgcggccccgagcctggggctggacgcaggtcccaggacgtgctgctcccttgtgtgagtgaccacggccccaagcccagggctggaggcaggtcccaggacgcgccgctccctcatgctgcccgggcccttcctccaagaccctacagagcctgaggggcaccttggcttccgcctgtgctagctttgccatgtcatctggaataatacttgaaattttgatttttggaaaaaaaagttttttatcttttgttgaaatcacctgttatccttgtttgtaaactgataacttttttgcttcttctcaggaatacagttttcaactgttgtcttgctcttgatagaaactgagaagcagcaatctgtatttgtggaggaaagtcctctcttttgcatattctaataaatgagccgcgtttgctcctcaaaaaaaaaa

SEQ ID NO: 58 - DNA, 3015 bp, Homo sapiens
agctgagggagccgcaatgtctcttgacagcggcggcggcgcagccggttccgggttcggcgcggggcggggatgtgaatcccgatggagcggcccgaggaaggcaagcagtcgccgccgccgcagccctggggacggctcctgcgtctgggcgcggaggagggcgagccgcacgtcctcctgaggaagcgggagtggaccatcgggcggagacgaggttgcgacctttccttccccagcaataaactggtctctggagatcactgtagaattgtagtggatgaaaaatcaggtcaggtgacactggaagataccagcaccagtggaacagtgattaacaagctgaaggttgttaagaagcagacatgccctttacagactggggatgtcatctacttggtgtacaggaagaatgaaccggaacacaggtctgggggtggtggcatctcccctaaaggaagtggtccctctgtggcaagtgatgaagtctccagctttgcctcagctctcccagacagaaagactgcgtccttttcgtcgttggaaccccaggatcaggaggatttggagcccgtgaagaagaaaatgagaggagatggggaccttgacctgaacgggcagttgttggtcgcacaaccgcgtagaaatgcccaaaccgtccacgaggacgtcagagcagcggctgggaagccagacaagatggaggagacgctgacatgcatcatctgccaggacctgctgcacgactgcgtgagtttgcagccctgcatgcacacgttctgcgcggcttgctactcgggctggatggagcgctcgtccctgtgtcctacctgccgctgtcccgtggagcggatctgtaaaaaccacatcctcaacaacctcgtggaagcatacctcatccagcatccagacaagagtcgcagtgaagaagatgtgcaaagtatggatgccaggaataaaatcactcaagacatgctgcagcccaaagtcaggcggtctttttctgatgaagaagggagttcagaggacctgctggagctgtcagacgttgacagtgagtcctcagacattagccagccatacgtcgtgtgccggcagtgtcctgagtacagaaggcaggcggcgcagcctccccactgcccagcacccgagggcgagccaggagccccacaggccctgggggatgcaccctccacgtccgtcagcctgacgacagcagtccaggattacgtgtgccctctgcaaggaagccacgccctgtgcacctgctgcttccagcccatgcccgaccggagagcggagcgcgagcaggacccgcgtgtcgcccctcagcagtgtgcggtctgcctgcagcctttctgccacctgtactggggctgcacccggaccggctgctacggctgcctggccccgttttgtgagctcaacctgggtgacaagtgtctggacggcgtgctgaacaacaacagctacgagtcagacatcctgaagaattacctggcaaccagaggtttgacatggaaaaacatgttgaccgagagcctcgtggctctccagcggggagtgtttctgctgtctgattacagagtcacgggagacaccgttctgtgttactgctgtggcctgcgcagcttccgtgagctgacctatcagtatcggcagaacattcctgcttccgagttgccagtggccgtaacatcccgtcctgactgctactggggccgtaactgccgcactcaggtgaaagctcaccacgccatgaaattcaatcatatctgtgaacagacaaggttcaaaaactaagcatccagaggccctgagcagctttcagcactggaggtgaagagagcgtgtttttaaaatacagagacaagcacgtcaaggtgttttcacagccccctgagggaagggacgcagggtctccgacaggtgctctggggtgactcttctgtggagctttaccctctgagtgagaccctccccagagccccgggggccgcagcccgccctcctggtgagcgctgggcagggctcgtggtggcatcagcagcagagacgaagcctttctgtaacatgcggccgtcccgccgagaggggcagttttgctcttttgtacattttccgaaactacagttaaagcagaagtctgtttttaggaaaagtttcaagggagaagggcaagtttatcaaaaacattgtttcaggagaagggagcataagtttacagcctacaggacgtacacaatatcctgctgctgggaaaaccacagcattttatctattttttattttaataggtttggtgcttatcttctaataagatttaaatgtcacaaactgtagcacaaataatataatttataatttacaaattgactaaaattgggtatagtatggtatttgaaagaataagcatatgcttctgtttattaaaaaaagaaaccttccaatgtccaaaactgctaaccctcgacgtggccgccaagttagtcgctccttgctaaccggtgagtgaccgcggccccgagcctggggctggacgcaggtcccaggacatgctgctcccttgtgtgagtgaccgcggccccgagcctggggctggacgcaggtcccaggacgtgctgctcccttgtgtgagtgaccacggccccaagcccagggctggaggcaggtcccaggacgcgccgctccctcatgctgcccgggcccttcctccaagaccctacagagcctgaggggcaccttggcttccgcctgtgctagctttgccatgtcatctggaataatacttgaaattttgatttttggaaaaaaaagttttttatcttttgttgaaatcacctgttatccttgtttgtaaactgataacttttttgcttcttctcaggaatacagttttcaactgttgtcttgctcttgatagaaactgagaagcagcaatctgtatttgtggaggaaagtcctctcttttgcatattctaataaatgagccgcgtttgctcctcaaaaaaaaaa

SEQ ID NO: 59 - DNA, 3168 bp, Homo sapiens
agctgagggagccgcaatgtctcttgacagcggcggcggcgcagccggttccgggttcggcgcggggcggggatgtgaatcccgatggagcggcccgaggaaggcaagcagtcgccgccgccgcagccctggggacggctcctgcgtctgggcgcggaggagggcgagccgcacgtcctcctgaggaagcgggagtggaccatcgggcggagacgaggttgcgacctttccttccccagcaataaactggtctctggagatcactgtagaattgtagtggatgaaaaatcaggtcaggtgacactggaagataccagcaccagtggaacagtgattaacaagctgaaggttgttaagaagcagacatgccctttacagactggggatgtcatctacttggtgtacaggaagaatgaaccggaacacaacgtggcatacctctatgaatctttaagtgaaaagcaaggcatgacacaagaatcctttgagatggtgccttgctgtgttgcccaggctggtctaaaactcctgggatcaagtgatcctcccaccttggcctcccaaagtattgtgattacagggtctgggggtggtggcatctcccctaaaggaagtggtccctctgtggcaagtgatgaagtctccagctttgcctcagctctcccagacagaaagactgcgtccttttcgtcgttggaaccccaggatcaggaggatttggagcccgtgaagaagaaaatgagaggagatggggaccttgacctgaacgggcagttgttggtcgcacaaccgcgtagaaatgcccaaaccgtccacgaggacgtcagagcagcggctgggaagccagacaagatggaggagacgctgacatgcatcatctgccaggacctgctgcacgactgcgtgagtttgcagccctgcatgcacacgttctgcgcggcttgctactcgggctggatggagcgctcgtccctgtgtcctacctgccgctgtcccgtggagcggatctgtaaaaaccacatcctcaacaacctcgtggaagcatacctcatccagcatccagacaagagtcgcagtgaagaagatgtgcaaagtatggatgccaggaataaaatcactcaagacatgctgcagcccaaagtcaggcggtctttttctgatgaagaagggagttcagaggacctgctggagctgtcagacgttgacagtgagtcctcagacattagccagccatacgtcgtgtgccggcagtgtcctgagtacagaaggcaggcggcgcagcctccccactgcccagcacccgagggcgagccaggagccccacaggccctgggggatgcaccctccacgtccgtcagcctgacgacagcagtccaggattacgtgtgccctctgcaaggaagccacgccctgtgcacctgctgcttccagcccatgcccgaccggagagcggagcgcgagcaggacccgcgtgtcgcccctcagcagtgtgcggtctgcctgcagcctttctgccacctgtactggggctgcacccggaccggctgctacggctgcctggccccgttttgtgagctcaacctgggtgacaagtgtctggacggcgtgctgaacaacaacagctacgagtcagacatcctgaagaattacctggcaaccagaggtttgacatggaaaaacatgttgaccgagagcctcgtggctctccagcggggagtgtttctgctgtctgattacagagtcacgggagacaccgttctgtgttactgctgtggcctgcgcagcttccgtgagctgacctatcagtatcggcagaacattcctgcttccgagttgccagtggccgtaacatcccgtcctgactgctactggggccgtaactgccgcactcaggtgaaagctcaccacgccatgaaattcaatcatatctgtgaacagacaaggttcaaaaactaagcatccagaggccctgagcagctttcagcactggaggtgaagagagcgtgtttttaaaatacagagacaagcacgtcaaggtgttttcacagccccctgagggaagggacgcagggtctccgacaggtgctctggggtgactcttctgtggagctttaccctctgagtgagaccctccccagagccccgggggccgcagcccgccctcctggtgagcgctgggcagggctcgtggtggcatcagcagcagagacgaagcctttctgtaacatgcggccgtcccgccgagaggggcagttttgctcttttgtacattttccgaaactacagttaaagcagaagtctgtttttaggaaaagtttcaagggagaagggcaagtttatcaaaaacattgtttcaggagaagggagcataagtttacagcctacaggacgtacacaatatcctgctgctgggaaaaccacagcattttatctattttttattttaataggtttggtgcttatcttctaataagatttaaatgtcacaaactgtagcacaaataatataatttataatttacaaattgactaaaattgggtatagtatggtatttgaaagaataagcatatgcttctgtttattaaaaaaagaaaccttccaatgtccaaaactgctaaccctcgacgtggccgccaagttagtcgctccttgctaaccggtgagtgaccgcggccccgagcctggggctggacgcaggtcccaggacatgctgctcccttgtgtgagtgaccgcggccccgagcctggggctggacgcaggtcccaggacgtgctgctcccttgtgtgagtgaccacggccccaagcccagggctggaggcaggtcccaggacgcgccgctccctcatgctgcccgggcccttcctccaagaccctacagagcctgaggggcaccttggcttccgcctgtgctagctttgccatgtcatctggaataatacttgaaattttgatttttggaaaaaaaagttttttatcttttgttgaaatcacctgttatccttgtttgtaaactgataacttttttgcttcttctcaggaatacagttttcaactgttgtcttgctcttgatagaaactgagaagcagcaatctgtatttgtggaggaaagtcctctcttttgcatattctaataaatgagccgcgtttgctcctcaaaaaaaaaa

SEQ ID NO: 60 - DNA, 1935 bp, Homo sapiens
acaatagcgactcactggacccagcccttagcaacggcctggcgacggtttccctgctgctgcagcccccgtcggctcctcttttccagtcctccactgccggggctgggcccggccgcgggaaggaccgaaggggatacagcgtgtccctgcggcggctgcaagaggactaagcatggatggcagccggagagtcagagcaacctctgtccttcccagatatggtccaccgtgcctatttaaaggacacttgagcaccaaaagtaatgctgcagtagactgctcggttccagtaagcgtgagtaccagcataaagtatgcagaccaacaacgaagagagaaactcaaaaaggaattagcacaatgtgaaaaagagttcaaattaactaaaactgcaatgcgagccaattataaaaataattccaagtcactttttaataccttacaaaagccctcaggcgaaccgcaaattgaggatgacatgttaaaagaagaaatgaatggattttcatcctttgcaaggtcactagtaccctcttcagagagactacacctaagtctacataaatccagtaaagtcatcacaaatggtcctgagaagaactccagttcctccccgtccagtgtggattatgcagcctccgggccccggaaactgagctctggagccctgtatggcagaaggcccagaagcacattcccaaattcccaccggtttcagttagtcatttcgaaagcacccagtggggatcttttggataaacattctgaactcttttctaacaaacaattgccattcactcctcgcactttaaaaacagaagcaaaatctttcctgtcacagtatcgctattatacacctgccaaaagaaaaaaggattttacagatcaacggatagaagctgaaacccagactgaattaagctttaaatctgagttggggacagctgagactaaaaacatgacagattcagaaatgaacataaagcaggcatctaattgtgtgacatatgatgccaaagaaaaaatagctcctttacctttagaagggcatgactcaacatgggatgagattaaggatgatgctcttcagcattcctcaccaagggcaatgtgtcagtattccctgaagcccccttcaactcgtaaaatctactctgatgaagaagaactgttgtatctgagtttcattgaagatgtaacagatgaaattttgaaacttggtttattttcaaacaggtttttagaacgactgttcgagcgacatataaaacaaaataaacatttggaggaggaaaaaatgcgccacctgctgcatgtcctgaaagtagacttaggctgcacatcggaggaaaactcggtaaagcaaaatgatgttgatatgttgaatgtatttgattttgaaaaggctgggaattcagaaccaaatgaattaaaaaatgaaagtgaagtaacaattcagcaggaacgtcaacaataccaaaaggctttggatatgttattgtcggcaccaaaggatgagaacgagatattcccttcaccaactgaatttttcatgcctatttataaatcaaagcattcagaaggggttataattcaacaggtgaatgatgaaacaaatcttgaaacttcaactttggatgaaaatcatccaagtatttcagacagtttaacagatcgggaaacttctgtgaatgtcattgaaggtgatagtgaccctgaaaaggttgagatttcaaatggattatgtggtcttaacacatcaccctcccaatctgttcagttctccagtgtcaaaggcgacaataatcatgacatggagttatcaactcttaaaatcatggaaatgagcattgaggactgccctttggatgtttaatcttcattaataaatacctcaaatggccagtaactcaaaaaaaaaaaaaaaaaaaa

SEQ ID NO: 61 - DNA, 2031 bp, Homo sapiens
acaatagcgactcactggacccagcccttagcaacggcctggcgacggtttccctgctgctgcagcccccgtcggctcctcttttccagtcctccactgccggggctgggcccggccgcgggaaggaccgaaggggatacagcgtgtccctgcggcggctgcaagaggactaagcatggatggcagccggagagtcagagcaacctctgtccttcccagatatggtccaccgtgcctatttaaaggacacttgagcaccaaaagtaatgctttttgcactgactcctcttctctcagactaagcactctccagctggtcaagaatcacatggctgttcactataataaaatcctttcagccaaagctgcagtagactgctcggttccagtaagcgtgagtaccagcataaagtatgcagaccaacaacgaagagagaaactcaaaaaggaattagcacaatgtgaaaaagagttcaaattaactaaaactgcaatgcgagccaattataaaaataattccaagtcactttttaataccttacaaaagccctcaggcgaaccgcaaattgaggatgacatgttaaaagaagaaatgaatggattttcatcctttgcaaggtcactagtaccctcttcagagagactacacctaagtctacataaatccagtaaagtcatcacaaatggtcctgagaagaactccagttcctccccgtccagtgtggattatgcagcctccgggccccggaaactgagctctggagccctgtatggcagaaggcccagaagcacattcccaaattcccaccggtttcagttagtcatttcgaaagcacccagtggggatcttttggataaacattctgaactcttttctaacaaacaattgccattcactcctcgcactttaaaaacagaagcaaaatctttcctgtcacagtatcgctattatacacctgccaaaagaaaaaaggattttacagatcaacggatagaagctgaaacccagactgaattaagctttaaatctgagttggggacagctgagactaaaaacatgacagattcagaaatgaacataaagcaggcatctaattgtgtgacatatgatgccaaagaaaaaatagctcctttacctttagaagggcatgactcaacatgggatgagattaaggatgatgctcttcagcattcctcaccaagggcaatgtgtcagtattccctgaagcccccttcaactcgtaaaatctactctgatgaagaagaactgttgtatctgagtttcattgaagatgtaacagatgaaattttgaaacttggtttattttcaaacaggtttttagaacgactgttcgagcgacatataaaacaaaataaacatttggaggaggaaaaaatgcgccacctgctgcatgtcctgaaagtagacttaggctgcacatcggaggaaaactcggtaaagcaaaatgatgttgatatgttgaatgtatttgattttgaaaaggctgggaattcagaaccaaatgaattaaaaaatgaaagtgaagtaacaattcagcaggaacgtcaacaataccaaaaggctttggatatgttattgtcggcaccaaaggatgagaacgagatattcccttcaccaactgaatttttcatgcctatttataaatcaaagcattcagaaggggttataattcaacaggtgaatgatgaaacaaatcttgaaacttcaactttggatgaaaatcatccaagtatttcagacagtttaacagatcgggaaacttctgtgaatgtcattgaaggtgatagtgaccctgaaaaggttgagatttcaaatggattatgtggtcttaacacatcaccctcccaatctgttcagttctccagtgtcaaaggcgacaataatcatgacatggagttatcaactcttaaaatcatggaaatgagcattgaggactgccctttggatgtttaatcttcattaataaatacctcaaatggccagtaactcaaaaaaaaaaaaaaaaaaaa

SEQ ID NO: 62 - DNA, 3027 bp, Homo sapiens
actcccccactcaccaggccccgcccctctacggaggccccgcctctagttcggcctgttttctcagtcccggcacccgccgcgaccgcaaaggcggccgcggttctaggaacttgacgtgatggggcttcctgaggagcgggtccggagcggcagcgggagccggggccaggaggaagctggagccggaggccgggcgcggagttggtctccgccgcccgaggtcagccgctccgcgcacgtcccctcgctgcagcgctaccgcgagctgcaccggcgctccgtggaggagccgcgggaattctggggagacattgccaaggaattttactggaagactccatgccctggcccattccttcggtacaactttgatgtgactaaagggaaaatcttcattgagtggatgaaaggagcaactaccaacatctgctacaatgtactggatcgaaatgtccatgagaaaaagcttggagataaagttgctttttactgggagggcaatgagccaggggagaccactcagatcacataccatcagcttctggtccaagtgtgtcagttcagcaatgttctccgaaaacagggcattcagaagggggaccgagtggccatctacatgcctatgatcccagagcttgtggtggccatgctggcatgtgcccgcattggggctttgcactccattgtgtttgcaggcttctcttcagagtctctatgtgaacggatcttggattccagctgcagtcttctcatcactacagatgccttctacaggggggaaaagcttgtgaacctgaaggagctggctgacgaggccctgcagaagtgtcaggagaagggtttcccagtaagatgctgcattgtggtcaagcacctggggcgggcagagctcggcatgggtgactccaccagccagtcccccccaattaagaggtcatgcccagatgtgcagggtaaactgaaagagaaatccaagcgtgttcagccccagatctcatggaaccaagggattgacttgtggtggcatgagctcatgcaagaggcaggggatgagtgtgagcccgagtggtgtgatgccgaggacccactcttcatcctgtacaccagtggctccacaggcaaacccaagggtgtggttcacacagttgggggctacatgctctatgtagccacaaccttcaagtatgtgtttgacttccatgcagaggatgtgttctggtgcacggcagacattggttggatcactggtcattcctacgtcacctatgggccactggccaatggtgccaccagtgttttgtttgaggggattcccacatatccggacgtgaaccgcctgtggagcattgtggacaaatacaaggtgaccaagttctacacagcacccacagccatccgtctgctcatgaagtttggagatgagcctgtcaccaagcatagccgggcatccttgcaggtgttaggcacagtgggtgaacccatcaaccctgaggcctggctatggtaccaccgggtggtaggtgcccagcgctgccccatcgtggacaccttctggcaaacagagacaggtggccacatgttgactccccttcctggtgccacacccatgaaacccggttctgctactttcccattctttggtgtagctcctgcaatcctgaatgagtccggggaagagttggaaggtgaagctgaaggttatctggtgttcaagcagccctggccagggatcatgcgcacagtctatgggaaccacgaacgctttgagacaacctactttaagaagtttcctggatactatgttacaggagatggctgccagcgggaccaggatggctattactggatcactggcaggattgatgacatgctcaatgtatctggacacctgctgagtacagcagaggtggagtcagcacttgtggaacatgaggctgttgcagaggcagctgtggtgggccaccctcatcctgtgaagggtgaatgcctctactgctttgtcaccttgtgtgatggccacaccttcagccccaagctcaccgaggagctcaagaagcagattagagaaaagattggccccattgccacaccagactacatccagaatgcacctggcttgcctaaaacccgctcagggaaaatcatgaggcgagtgcttcggaagattgctcagaatgaccatgacctcggggacatgtctactgtggctgacccatctgtcatcagtcacctcttcagccaccgctgcctgaccatccagtgaacatgatcctgacctttacctaggattcctcctgctccaaactttgcccatcctctttgccccctcaggagtgctgagggccagtgttgacccacactaccctcccttgaccagctgtctgggaccggaaaccagctttgtctccaggtagagacaacatcctgtgactgccaggcagaaaggacagggcccaggtcagcctcagtctgctgtgcctccagactgcagagctctcagaacccagaacagagacgaaaaggctacctctcctacccaagttaagtgttcaaaggggatgtgagggcctccactgaagcagggaggcagctgtgtaatcctatgtcagctctcttaggaagccccagtacttatattgggcatgcacttgcccttaaaaacaatgatttgtgagtccaggaacaatttactatttttaaaatattttgctgcttctgttctgggtctgaattcccttttgtgccagatgccagtactgtctgcccattggctccaggggctgtatgggcagattcagtctccagagggtattcagatcatctgcttctttgaaggagtaaatgtgttttgttcctagggccagaggagcttgtcttccttgtcctctgttcccaccctcccctgaacagaacccagcccataagagacattctcagatgaaactctgttttcttgccccagtcaggctcaagccctgtggttgtaggaataaagcctgtgatctcaagaagtggaaaaaaaaa

SEQ ID NO: 63 - DNA, 2988 bp, Homo sapiens
actcccccactcaccaggccccgcccctctacggaggccccgcctctagttcggcctgttttctcagtcccggcacccgccgcgaccgcaaaggcggccgcggttctaggaacttgacgtgatggggcttcctgaggagcgggtccggagcggcagcgggagccggggccaggaggaagctggagccggaggccgggcgcggagttggtctccgccgcccgaggtcagccgctccgcgcacgtcccctcgctgcagcgctaccgcgagctgcaccggcgctccgtggaggagccgcgggaattctggggagacattgccaaggaattttactggaagactccatgccctggcccattccttcggtacaactttgatgtgactaaagggaaaatcttcattgagtggatgaaaggagcaactaccaacatctgctacaatgtactggatcgaaatgtccatgagaaaaagcttggagataaagttgctttttactgggagggcaatgagccaggggagaccactcagatcacataccatcagcttctggtccaagtgtgtcagttcagcaatgttctccgaaaacagggcattcagaagggggaccgagtggccatctacatgcctatgatcccagagcttgtggtggccatgctggcatgtgcccgcattggggctttgcactccattgtgtttgcaggcttctcttcagagtctctatgtgaacggatcttggattccagctgcagtcttctcatcactacagatgccttctacaggggggaaaagcttgtgaacctgaaggagctggctgacgaggccctgcagaagtgtcaggagaagggtttcccagtaagatgctgcattgtggtcaagcacctggggcgggcagagctcggcatgggtgactccaccagccagtcccccccaattaagaggtcatgcccagatgtgcagatctcatggaaccaagggattgacttgtggtggcatgagctcatgcaagaggcaggggatgagtgtgagcccgagtggtgtgatgccgaggacccactcttcatcctgtacaccagtggctccacaggcaaacccaagggtgtggttcacacagttgggggctacatgctctatgtagccacaaccttcaagtatgtgtttgacttccatgcagaggatgtgttctggtgcacggcagacattggttggatcactggtcattcctacgtcacctatgggccactggccaatggtgccaccagtgttttgtttgaggggattcccacatatccggacgtgaaccgcctgtggagcattgtggacaaatacaaggtgaccaagttctacacagcacccacagccatccgtctgctcatgaagtttggagatgagcctgtcaccaagcatagccgggcatccttgcaggtgttaggcacagtgggtgaacccatcaaccctgaggcctggctatggtaccaccgggtggtaggtgcccagcgctgccccatcgtggacaccttctggcaaacagagacaggtggccacatgttgactccccttcctggtgccacacccatgaaacccggttctgctactttcccattctttggtgtagctcctgcaatcctgaatgagtccggggaagagttggaaggtgaagctgaaggttatctggtgttcaagcagccctggccagggatcatgcgcacagtctatgggaaccacgaacgctttgagacaacctactttaagaagtttcctggatactatgttacaggagatggctgccagcgggaccaggatggctattactggatcactggcaggattgatgacatgctcaatgtatctggacacctgctgagtacagcagaggtggagtcagcacttgtggaacatgaggctgttgcagaggcagctgtggtgggccaccctcatcctgtgaagggtgaatgcctctactgctttgtcaccttgtgtgatggccacaccttcagccccaagctcaccgaggagctcaagaagcagattagagaaaagattggccccattgccacaccagactacatccagaatgcacctggcttgcctaaaacccgctcagggaaaatcatgaggcgagtgcttcggaagattgctcagaatgaccatgacctcggggacatgtctactgtggctgacccatctgtcatcagtcacctcttcagccaccgctgcctgaccatccagtgaacatgatcctgacctttacctaggattcctcctgctccaaactttgcccatcctctttgccccctcaggagtgctgagggccagtgttgacccacactaccctcccttgaccagctgtctgggaccggaaaccagctttgtctccaggtagagacaacatcctgtgactgccaggcagaaaggacagggcccaggtcagcctcagtctgctgtgcctccagactgcagagctctcagaacccagaacagagacgaaaaggctacctctcctacccaagttaagtgttcaaaggggatgtgagggcctccactgaagcagggaggcagctgtgtaatcctatgtcagctctcttaggaagccccagtacttatattgggcatgcacttgcccttaaaaacaatgatttgtgagtccaggaacaatttactatttttaaaatattttgctgcttctgttctgggtctgaattcccttttgtgccagatgccagtactgtctgcccattggctccaggggctgtatgggcagattcagtctccagagggtattcagatcatctgcttctttgaaggagtaaatgtgttttgttcctagggccagaggagcttgtcttccttgtcctctgttcccaccctcccctgaacagaacccagcccataagagacattctcagatgaaactctgttttcttgccccagtcaggctcaagccctgtggttgtaggaataaagcctgtgatctcaagaagtggaaaaaaaaa

SEQ ID NO: 64 - DNA, 3315 bp, Homo sapiens
atggtgtaggagaaacccggcccccagaagattgtgggtgtagtggccacagccttacaggcaggcaggggtggttggtgtcaacaggggggccaacagggtaccagagccaagaccctcggcctcctcccccgccgccttcctgcagatctgcttggctttgaggaagagtggcagtactgcctcactgcataagggatgggatcagagaacagtgctttaaagagctatacactgagagaaccaccatttaccttaccctctggacttgctgtttatcccgctgtactgcaagatggcaaatttgcttcagtttttgtgtataagagagaaaatgaagacaaggttaataaagctgccaagcatttgaagacacttcgtcacccttgcttgctaagatttttatcttgtactgtggaagcggatggcattcatcttgtcactgagcgagtacagcccctggaagtggctttggaaacattgtcttctgcagaggtctgtgctgggatctatgacatattgctggctcttatcttccttcatgacagaggacacctaacacacaataatgtctgtttatcatctgtgtttgtgagtgaagatggacactggaagctaggaggaatggaaactgtttgtaaagtttctcaggccacaccagagtttctgaggagtattcagtcaataagagacccagcatctatccctcctgaagagatgtctccagaattcacaactctcccagagtgtcatggacatgcccgggatgccttttcatttggaacattggtggaaagtttgctcacaatcttaaatgaacaggtttcagcggatgttctctccagctttcaacagaccttgcactcaactttgctgaatcccattccaaaatgtcggccagcgctctgcaccttactatctcatgacttcttcagaaatgattttctggaagttgtgaatttcttgaaaagtttaacattgaagagtgaagaggagaaaacggaattctttaaatttctgctggacagagtcagctgcttgtcagaggaattgatagcttcaaggttggtgcctcttctgcttaatcagttggtgtttgcagagccagtggctgttaagagttttcttccttatctgcttggccccaaaaaagatcatgcgcagggagaaactccttgcttgctctcaccagccctgttccagtcacgggtgatccccgtgcttctccagttgtttgaagttcatgaagagcatgtgcggatggtgctgctgtctcacatcgaggcctacgtggagcacttcactcaggagcagctgaagaaagtcatcttgccacaggttttgctgggcctgcgtgatactagcgattccattgtggcaattactctgcatagcctagcagtgctggtctctctgcttggaccagaggtggttgtgggaggagaacgaaccaagatcttcaaacgcactgccccaagttttactaaaaatactgacctttctctagaaggcgatccattttctcagcctattaaatttcccataaatggactctcagatgtaaaaaatacttcggaggacagtgaaaacttcccatcaagttctaaaaagtctgaggagtggcctgactggagtgaacctgaggagcctgaaaatcaaactgtcaacatacagatttggcctagagaaccttgtgatgatgtcaagtcccagtgcactaccttggatgtggaagagtcatcttgggatgactgcgagcccagcagcttagatactaaagtaaacccaggaggtggaatcactgctacaaaacctgttacctcaggggagcagaagcctattcctgctttgctttcactcactgaagagtctatgccttggaaatcaagcttaccccaaaagattagccttgtacaaaggggggatgacgcagaccaaatcgagccgccaaaagtgtcatcacaagaaaggccccttaaggttccatcagaacttggtttaggagaggaattcaccattcaagtaaaaaagaagccagtaaaagatcctgagatggattggtttgctgatatgatcccagaaattaagccttctgctgcttttcttatattacctgaactgaggacagaaatggtcccaaaaaaggatgatgtctccccagtgatgcagttttcctcaaaatttgctgcagcagaaattactgagggagaggctgaaggctgggaagaagaaggggagctgaactgggaagataataactggtgacaatagatgtgagttaaactttaggaaaaaggattccctttttttaaaaaaaatcaatacctcaaaagcaggctttgggacaagaaaaccccaaagtggcctgcttttcccatcccaggagctcattatccagtctgtgccaactgaagtaggagactgactgtgagtgctggctaaaagccctgggtggtgaggctcacagtactggtttccaggaggaagagcctttgtgcatttgactgaggccagtttctatgaagagcaagtagctgaggagaggtcgaatttactgctttttccaggacaattctggaagtaaagaaaatgtaattcaagctggttagcttaattttgtgccattctttaacataagagtaagctctattatgaaatacaactttaaaaaattttagctataaattatataaatgattttaaattgctgaggtttccttaggcagcttatttatttgtttacagttagactatctgagtaaatggttctttgtggacctaggcagttcctgactgttccacatgtagtacattgtaccaaagttcttaataagaatattccccacaatcctgttctctaaatgtcaaataaagattattttcactagattcaactttacaaaatttgttttatatctgttagaaaatgtacagacataagtattttcagttgacaaagcatcaaacccagttctgcctagtgataagtttcaccctagagtatgtatgtaacgttttagcttatccatcctttcttggagcgcctccatttccattgaaagccaggctggagcaggacccttttggagtagtgactcagttgcttccaaagcccctgctattgtatgcagcgctgacctgtactcttcttcccaggggaactcctgacgagctctttttgcataaggctggaaaaaaaacataagtaatatcacaatatccattctaaatataaagaaccttccttttggactggagtaaagcttacatgcaaattttattctagtcattggatcacaagggtaggaggatgca

SEQ ID NO: 65 - DNA, 3477 bp, Homo sapiens
atggtgtaggagaaacccggcccccagaagattgtgggtgtagtggccacagccttacaggcaggcaggggtggttggtgtcaacaggggggccaacagggtaccagagccaagaccctcggcctcctcccccgccgccttcctgcagatctgcttggctttgaggaagagtggcagtactgcctcactgcataagggatgggatcagagaacagtgctttaaagagctatacactgagagaaccaccatttaccttaccctctggacttgctgtttatcccgctgtactgcaagatggcaaatttgcttcagtttttgtgtataagagagaaaatgaagacaaggttaataaagctgccaagcatttgaagacacttcgtcacccttgcttgctaagatttttatcttgtactgtggaagcggatggcattcatcttgtcactgagcgagtacagcccctggaagtggctttggaaacattgtcttctgcagaggtctgtgctgggatctatgacatattgctggctcttatcttccttcatgacagaggacacctaacacacaataatgtctgtttatcatctgtgtttgtgagtgaagatggacactggaagctaggaggaatggaaactgtttgtaaagtttctcaggccacaccagagtttctgaggagtattcagtcaataagagacccagcatctatccctcctgaagagatgtctccagaattcacaactctcccagagtgtcatggacatgcccgggatgccttttcatttggaacattggtggaaagtttgctcacaatcttaaatgaacaggtttcagcggatgttctctccagctttcaacagaccttgcactcaactttgctgaatcccattccaaaatgtcggccagcgctctgcaccttactatctcatgacttcttcagaaatgattttctggaagttgtgaatttcttgaaaagtttaacattgaagagtgaagaggagaaaacggaattctttaaatttctgctggacagagtcagctgcttgtcagaggaattgatagcttcaaggttggtgcctcttctgcttaatcagttggtgtttgcagagccagtggctgttaagagttttcttccttatctgcttggccccaaaaaagatcatgcgcagggagaaactccttgcttgctctcaccagccctgttccagtcacgggtgatccccgtgcttctccagttgtttgaagttcatgaagagcatgtgcggatggtgctgctgtctcacatcgaggcctacgtggagcacttcactcaggagcagctgaagaaagtcatcttgccacaggttttgctgggcctgcgtgatactagcgattccattgtggcaattactctgcatagcctagcagtgctggtctctctgcttggaccagaggtggttgtgggaggagaacgaaccaagatcttcaaacgcactgccccaagttttactaaaaatactgacctttctctagaagattctcctatgtgtgtcgtctgcagccatcacagtcagatctcgccaatcttggagaaccccttctctagcatattccctaaatgtttcttttctggcagcacgcccatcaacagcaagaagcacatacagcgagattactacaatactcttttacagacaggcgatccattttctcagcctattaaatttcccataaatggactctcagatgtaaaaaatacttcggaggacagtgaaaacttcccatcaagttctaaaaagtctgaggagtggcctgactggagtgaacctgaggagcctgaaaatcaaactgtcaacatacagatttggcctagagaaccttgtgatgatgtcaagtcccagtgcactaccttggatgtggaagagtcatcttgggatgactgcgagcccagcagcttagatactaaagtaaacccaggaggtggaatcactgctacaaaacctgttacctcaggggagcagaagcctattcctgctttgctttcactcactgaagagtctatgccttggaaatcaagcttaccccaaaagattagccttgtacaaaggggggatgacgcagaccaaatcgagccgccaaaagtgtcatcacaagaaaggccccttaaggttccatcagaacttggtttaggagaggaattcaccattcaagtaaaaaagaagccagtaaaagatcctgagatggattggtttgctgatatgatcccagaaattaagccttctgctgcttttcttatattacctgaactgaggacagaaatggtcccaaaaaaggatgatgtctccccagtgatgcagttttcctcaaaatttgctgcagcagaaattactgagggagaggctgaaggctgggaagaagaaggggagctgaactgggaagataataactggtgacaatagatgtgagttaaactttaggaaaaaggattccctttttttaaaaaaaatcaatacctcaaaagcaggctttgggacaagaaaaccccaaagtggcctgcttttcccatcccaggagctcattatccagtctgtgccaactgaagtaggagactgactgtgagtgctggctaaaagccctgggtggtgaggctcacagtactggtttccaggaggaagagcctttgtgcatttgactgaggccagtttctatgaagagcaagtagctgaggagaggtcgaatttactgctttttccaggacaattctggaagtaaagaaaatgtaattcaagctggttagcttaattttgtgccattctttaacataagagtaagctctattatgaaatacaactttaaaaaattttagctataaattatataaatgattttaaattgctgaggtttccttaggcagcttatttatttgtttacagttagactatctgagtaaatggttctttgtggacctaggcagttcctgactgttccacatgtagtacattgtaccaaagttcttaataagaatattccccacaatcctgttctctaaatgtcaaataaagattattttcactagattcaactttacaaaatttgttttatatctgttagaaaatgtacagacataagtattttcagttgacaaagcatcaaacccagttctgcctagtgataagtttcaccctagagtatgtatgtaacgttttagcttatccatcctttcttggagcgcctccatttccattgaaagccaggctggagcaggacccttttggagtagtgactcagttgcttccaaagcccctgctattgtatgcagcgctgacctgtactcttcttcccaggggaactcctgacgagctctttttgcataaggctggaaaaaaaacataagtaatatcacaatatccattctaaatataaagaaccttccttttggactggagtaaagcttacatgcaaattttattctagtcattggatcacaagggtaggaggatgca

SEQ ID NO: 66 - DNA, 6530 bp, Homo sapiens
ggtcgatgagagggcggccttagcattaggagtgcgtcggctgcaccctggcggatggaccttgggaaggaggggaggggaccatcggggtcggcggggagctacgggttcccctcttccaagacgggtgccaagtgatgagtatcaggtgtctatggtgagatttggggaggatcccagaccttaacagccctttggttgaaacctctcacaatgtggcagagatggggttttgatgtgttgcccaggctggtcttgaactcctgagcttaagtgatgtgtccgcctgggcctcccaaagtgctggaattacagacatgagtggcaataaaaggggtagcagagcttcctgccctcaccgtggtgccgagtgcctgctgccttgggccgccttgaacctccagggtttccagctcctcctccttcaccccagtgccactgccatgatggatgtgagtgaacttggggagtctgcccgctacctccgccagggctaccaggagatgacgaaggtgcacactatcccatgggacgggaagaagcgagtctgggtgcctgatgaacaggacgcctacgtggaggccgaggtcaagtcggaggctaccgggggcagagtcaccgtggagaccaaagaccagaaggtgctgatggtgcgtgaagccgagctgcagcccatgaacccgcctcgcttcgacttactggaggacatggccatgatgacgcacctgaacgaggcctctgtgctgcacaacctgcgccagcgctatgcccgctggatgatctatacctactcaggcctcttctgtgtcaccatcaacccctacaaatggctcccagtctatacggcctccgtagtggctgcttacaagggaaagcgccgctcagattccccgccccatatatatgcggtggcggacaacgcctacaacgacatgctgcgcaaccgagacaaccagtccatgctgatcaccggagagtcgggggccggtaagacggttaacaccaagcgggtcattcagtactttgccatcgtcgctgccctgggagacgggccgggcaagaaggcccaatttctggcaacaaagacggggggcacccttgaggatcaaatcatcgaggccaaccctgccatggaggcctttggcaacgccaagaccctgaggaatgataactcctcccgctttggcaagttcatccgcattcactttggtccctctgggaagctggcatccgcggatattgacagctatctcctggagaagtcgcgggtgatcttccagttgcctggtgagcgcagctaccatgtctactaccagatcctctcagggaggaagccagagctgcaggacatgctgcttctgtctatgaacccctatgactaccacttctgcagccagggcgtcatcaccgtggacaacatgaatgatggggaggagctcatcgccaccgaccatgccatggacatcctaggcttcagcgtggatgagaaatgtgcctgctataagatcgtgggcgccctcctgcactttggcaacatgaagttcaagcagaagcagcgggaggagcaggcggaggccgatggcactgagagtgctgacaaggctgcctacctgatgggggtcagcagtggggacctcctcaaaggccttttgcacccccgggtgcgtgtagggaacgagtacgtgaccaagggccagagtgtggagcaggtggtgtttgctgtgggggctctggccaaggccacctatgaccggctgttcaggtggctggtgtctcggatcaaccagaccctggacacaaagctgccccggcagttcttcatcggggttctggacatcgctgggtttgagatctttgagttcaacagcttcgaacagctgtgcatcaacttcaccaatgagaaattgcagcagttcttcaaccagcacatgtttgtgctggagcaggaggagtacaagcgggagggcatcgactgggtcttcatcgacttcggccttgacctgcagccttgcatcgacctcatcgagaagccactgggcatcctgtccatcctggaggaggaatgcatgttccccaaggcctcagacgccagcttccgggccaagctctacgacaaccacgcggggaagtcacccaatttccagcagcctcggcctgacaagaagcgcaagtaccaggcccacttcgaggtggtccactacgcaggcgtggtgccttacagcattgtgggctggctggagaaaaacaaggatcccctgaatgagaccgtggtccccatcttccagaagtcacagaataggctcctggcgactctctatgagaattatgcgggctcctgctccactgagccccccaagtctggggtgaaagagaagcgtaagaaggcagcatcgttccagacggtgtcccagctgcacaaggagaacctcaacaagctgatgaccaacctgcgggccacacagccccacttcgtccgctgcattgtccccaacgagaacaaaaccccaggggtcatggatgccttcttggtgctacaccagctgcgctgcaatggggtcctggaggggatccggatctgccgccaagggttccccaacaggttgctctacaccgacttccggcagcggtaccgtatcctgaaccccagtgccatcccggatgacaccttcatggacagcaggaaggccacagagaaactgctgggctcgctggacttggatcacacccagtaccagtttggccacaccaaggtgttcttcaaggctgggcttctaggcgtcctggaagagctccgtgaccagcgcctggccaaggtgctgacgctgctgcaggcgcggagccgtggccgcctcatgcgccttgagtaccagcgcctgctgggaggcagggatgcgctgttcaccatccagtggaacatccgtgccttcaatgccgtcaagaactggtcatggatgaagctctttttcaagatgaagccgctgctgcgctcggcgcaggctgaggaggagctggcggccctgcgggcagagctgcgggggttgcgaggggcgctggctgcggccgaggccaagcgccaggaactggaggagacgcacgtcagcatcacccaggagaagaatgacctggccctgcagctgcaggctgagcaggacaacctggcagatgccgaggagcgctgccacttgctgatcaagtccaaggtgcagctggaggggaaggtgaaggagctgagtgagcggctggaggatgaggaggaggtgaacgctgacctggccgcccgccggcgcaagctggaggacgagtgcacggagctcaagaaggacattgatgacctgaagctgacactggccaaagctgagaaggagaagcaagccactgagaacaaggtgaagaacctgacggaagagatggctgcgctggacgagtcagtggcccggctgaccaaggagaagaaggcgttgcaggaggcccaccaacaggccctgggtgacctgcaggccgaggaggaccgtgtgagcgcgctgaccaaggccaagctccggctggagcaacaggtggaggacctggaatgctccctggagcaggagaagaagctgcgcatggacacggagcgggccaagcgcaagctggagggtgacctgaagctgacgcaggagtcggtggctgatgctgctcaagacaagcagcagctggaggagaagctcaagaagaaggactccgagctgagccagctgagcctgcgggtggaagacgagcagctcttgggggcccagatgcagaagaagatcaaggagctgcaggctcgggcggaggagctggaagaggagctggaggcagagcgggcagcccgggcccgcgtggagaagcagcgtgcagaggcggcgcgggagctggaggagctgagcgagcggctggaggaggcaggcggcgcatccgcggggcagcgcgagggctgccgcaagcgggaggcggagctggggaggctgcggcgggagctggaggaggcggcgctgcggcacgaggccacagtggcggcactgcggcgcaagcaggcggagggcgcggcggagctgggggagcaggtggacagcctgcagcgggtgcggcagaagctggagaaggagaagagtgagctgcgcatggaggtggacgacctggctgccaacgtggagactctgacccgcgccaaggccagtgcagagaagctgtgccggacctatgaggatcagctaagcgaggccaagatcaaggtggaggagctgcagcggcagctggcggacgcaagcacgcagcgtgggcgactacagacggaaagcggggagctgagtcgcctgctagaggagaaggagtgtctgatcagtcagctgagccgtggaaaggccctggccgcccaaagcctggaagagttgcggcgccagctagaggaggaaagcaaggccaagagtgccctggcccacgccgtgcaggctctgcggcacgactgtgacctcctgcgggagcaacacgaggaggaggctgaggcccaggctgagctgcagcggctgctgtccaaggccaatgccgaggtggcccagtggaggagcaagtacgaagcagatgccatccagaggaccgaggagctggaggaggccaaaaaaaagctggcactgcggctgcaggaggcagaggagggcgtggaggctgccaacgccaagtgctcatcgttggagaaggccaagctgcggctacagacagagtcagaggatgtaaccctggagctggagcgggcgacctcagcagctgctgcgctggacaagaagcagcggcacttggaacgggcactggaggaacggcggcggcaggaggaggagatgcagcgggagctggaggcggcacagagggagtcccgtggcctgggcaccgagctcttccggctgcggcacggccacgaggaggcacttgaagccctggagacgctcaagcgggagaacaagaacctgcaggaggagatcagcgacctcacagaccaggtgagtctcagtgggaagagcatccaggaactggagaaaaccaagaaggcgctggaaggcgagaagagtgagatccaggctgcactggaggaggcagagggggccctggagctggaggagaccaagacgctgcggatccagctggagctctcccaggtcaaagcagaagtggaccggaagctggcagagaaagacgaggagtgcgctaacctgaggcgcaaccaccagcgagctgtggagtccctgcaggcctccctggatgcagagacacgggcccgcaatgaggcgctgcggctcaagaagaagatggagggtgacctcaacgacctggagctgcagctgggccatgccacccgtcaggccacagaggcccaggctgccacgcggctgatgcaggcacagctcaaggaggagcaggcagggcgggacgaggagcagcggctggcagctgagctccacgagcaggcgcaggctctggagcgccgggcctcgctgctggctgcggagctggaggagctgcgggctgccctggagcagggcgagcgcagccggcgactggcagagcaggagcttttggaggccaccgagcgcctcaaccttctgcattcgcagaacacaggcctcctaaaccagaagaagaagctggaggcggacttggcccagctgagcggggaggtggaggaggctgcacaggagaggcgggaggctgaggagaaggccaaaaaggccatcactgatgcggccatgatggccgaggagctgaagaaggagcaggacacaagtgcacacctggaacggatgaagaagacgctggagcagacggtgcgcgagctccaggcccgccttgaggaggcagaacaggccgccctccgtggcgggaagaagcaggtgcagaagctggaggccaaggtacgggagctggaggctgagcttgatgcagagcagaagaagcacgccgaggcccttaagggcgtgcgcaagcatgagcgccgtgtcaaggagctcgcataccaggccgaggaggacaggaagaacctggctcgcatgcaggacctggtggacaagctgcagagcaaggtcaagagctacaagcgccagtttgaggaggcggagcagcaggccaacaccaacctggccaagtatcgcaaggcccagcacgagctggatgatgcggaggagcgggcagacatggcggaaacccaggccaacaagctgcgggcacggacccgggacgccctgggccccaagcacaaggagtgacggcctgaccccctgggctctaaagaggaatgtctgctgttgcacatctggctgaggccacctgccccgatcctgccatctctgcatcgccccctgctgccttcagccttccctgggccctgaataaacaccacagccagtttccttctcattcttttctttggggttcaggaggaaaaacacagtcctagggacaaaagccaggtccacagcagtcatttttaaaataaagttatttaatagtctccaaaaaaaaaaaaa

SEQ ID NO: 67 - DNA, 4002 bp, Homo sapiens
gagaattggaaggcggcagtgaagcggaagccattactctctggagtcgattgccccgagacacatgggccaaggaggggtcagcggcgaattctttcggcctgttggggacccctcgtgtccccacgccagactggacctcccgtatgaacttctcttcgcatcggcggcggcttccgtcacctccgctcccccgatcctattcccagtcgtatgccagcttggagagtcacgtgagagcaagagagtagctttctggttgtcctggtgccctgctcaggcaaactgactgccattctctgaggatggcagctctgtcccccacatttgccacgtccacccaggattccacctgtctccaggactcagaatttcctgtttcttcaaaagaccattcctgtccccagaatttggacctgttcgtgtgcagtggtctggagcctcacacacccagtgttggttcccaggaatcggtgactttccaagatgtcgctgtggactttaccgagaaggagtggcccttgctggattcttctcagagaaaactgtacaaagatgtaatgctggagaactacagcaacctcacttcactggattgggagactccatctaaaaccaagtggtcacttcttatggaagatatttttgggaaggaaacgcccagtggtgtgacgatggaaagagccggtcttggagagaagtccactgaatacgctcacttgttcgaagtctttggcatggaccctcatctcactcagccaatgggaaggcacgctggcaagaggccctatcaccgccgcgactatggggtagcgttcaagggcaggccgcacctcactcagcacatgagcatgtacgacgggagaaaaatgcatgaatgtcatcagtgccaaaaagccttcaccacgagcgcgtccctcacacggcacaggagaatccacaccggggagaagccttacgagtgcagcgactgcgggaaagccttcaacgacccttcagcccttaggagccacgcaagaactcacctcaaagagaagccctttgactgcagtcagtgtggaaatgcattccggaccctctcggccctgaaaatccacatgcgagttcacactggcgagaggccttacaagtgtgatcagtgcgggaaggcttacggccggagctgccacctcatcgcacacaagagaacgcacaccggagagaggccctacgagtgtcacgactgtgggaaagctttccagcacccctcccacctcaaagagcacgtgaggaatcacacgggggagaagccctacgcgtgcacgcagtgcggcaaagccttccgctggaagtccaactttaatttgcacaagaagaaccacatggtggagaagacctacgaatgtaaagaatgcgggaaatcctttggcgatctcgtgtcccggaggaaacacatgaggattcacatcgtcaagaaacccgtggaatgtcggcagtgcgggaagaccttccgaaaccagtccatccttaagactcacatgaactctcacactggagagaaaccatacgggtgcgatctctgcgggaaagctttcagcgcgagttcaaacctcaccgcacacaggaagatacacacgcaagagagacgctacgaatgcgccgcctgcgggaaagtcttcggtgactatttatcccggcggaggcacatgagcgttcaccttgtaaagaaacgagttgagtgtaggcagtgtggcaaggccttcaggaaccagtcaacgctgaagacgcacatgcgaagccacacgggggagaaaccgtacgaatgcgatcactgtgggaaggccttcagcataggctccaacctgaatgtgcacaggcggatccacaccggggagaagccctacgaatgccttgtctgcgggaaagccttcagcgaccactcatccctcaggagccacgtgaaaactcaccggggagagaagctctttgtgtcatccgtgtggaaaaggctccagtgagcgcgcctgctttagagacacaggatgattcagaccggaaacagacctcgtgggtgtaagaggaagcctctgtgagctcgcaccttactgggtgcaaaagaatccacggaacttgggagaagtccagttcctgtaaaaactgggaagacgaggcgttctcatcccataggaggtttgtgagaactcacgccgggggtgaaaatgtacgtctgtagcatggagaagccttcagggtacattcagctcttaacaaacacaggaggacttaatggcagcttggcatttaatgtcaaaatccaagccgtggcatttaatgtcaaaatgacttcagaccacttctagccttctgggcccatgagtaataatgagcacactagggagcatctctgtaaacacagtggctggggaaacccttcctagtctcacttgattcctcatgacggaaatcacactaaagagagaaatcagtgaagtaaggaacgtggaaggtcatgaatgggccgcaaaccacggccagctgcttgtctttgtatggcttgccagctaacaatagtggttccatctttaaggaagaagaatgtttgatggagaaaatttgtggccaatgaagtctgaaatacttcctgtcatctgcccctttccagaaaaacttggccgacccttggtctacagcacgggttctcagtcgggcgacgatttggctgtctaggcgtcatttggcaatgtctagagacatttttggtagttagaatggggggaagatactcctgacttgtaataagaagacatcagagatgctgctaagtcggctccagcacacaggagccccccacaacgaagagttagtgcccccaaacgtcactgttgctgaggttgaaaataatcatgcagtcattcctcaattactgcctgcagcaattcctccatttttatgaatcttgtgagcacttacgctaggagaaatttcttttacaaaacttttaaaatacaattagtgctgataattcctatgtggaaatgattccagccatggtcccctcacttgagcatgtgaatattctcacggagagaagccccagcgagattttccggtgaatacgggattgcacttactctttcatcacggaaacagaccccccgagagaagccccaacgagattttccggtgaatacgggactgcacgtactctctcatcatgaaaacagagccccgttcataaatttttcatctttatttttaaggttatactcctctaaataacccttaagcctcatcaagaaaggtttgtttatagtatttttactatagcttcatccttgataacgtcctaatttccttctggacaacctccttgaccaatggcatattgagatctatgtgacatgaggatatttctcagtaccactttgttactggtacctgatgcacacggattgcgaccagagcatgatgcctccatcaagtggtaatatgtttgcagcctgctgtccagccaagagtgacagatacttctagtgacttccccggtatccactctcatcttcttccaatatcaagagaatccaggttctgtcagattagtaaggtgtgctaatctaaattttaaaaaatctcttacaggttttcttgcagctggtaccatccatgtctcacagccctggccactgacagatcagcagatgtcaccacatgggcttctgagaaagctcttgaatggggatcgttcttaaacatgaattcctccctgtatgttttgttctttgctttacttttcaccttgcaaagagatccagtacctagtattggaagatccaccttaacgaccgtgcatatgaaaaccacagtctaaggaagtgactgcagaaagctcacagcgaccctggcctcccctgtggcctctttgagtgtctgcagcagccctggacttccagacttctatcacatgagaaaaaataaaactgattattggtttaagctgctaaaaaaaaaaaaaaaaaaaaaaaa

SEQ ID NO: 68 - DNA, 4098 bp, Homo sapiens
gagaattggaaggcggcagtgaagcggaagccattactctctggagtcgattgccccgagacacatgggccaaggaggggtcagcggcgaattctttcggcctgttggggacccctcgtgtccccacgccagactggacctcccgtatgaacttctcttcgcatcggcggcggcttccgtcacctccgctcccccgatcctattcccagtcgtatgccagcttggagagtcacgtgagagcaagagagtagctttctggttgtcctggtgccctgctcaggcaaactgactgccattctctgaggatggcagctctgtcccccacatttgccacgtccacccaggattccacctgtctccaggactcagaatttcctgtttcttcaaaagaccattcctgtccccagaatttggacctgttcgtgtgcagtggtctggagcctcacacacccagtgttggttcccaggaatcggtgactttccaagatgtcgctgtggactttaccgagaaggagtggcccttgctggattcttctcagagaaaactgtacaaagatgtaatgctggagaactacagcaacctcacttcactggggtatcaggtcggcaaacccagcctcatctcacacttggagcaggaggaggagccgaggacagaggagaggggcgctcaccagggcgcttgtgcagattgggagactccatctaaaaccaagtggtcacttcttatggaagatatttttgggaaggaaacgcccagtggtgtgacgatggaaagagccggtcttggagagaagtccactgaatacgctcacttgttcgaagtctttggcatggaccctcatctcactcagccaatgggaaggcacgctggcaagaggccctatcaccgccgcgactatggggtagcgttcaagggcaggccgcacctcactcagcacatgagcatgtacgacgggagaaaaatgcatgaatgtcatcagtgccaaaaagccttcaccacgagcgcgtccctcacacggcacaggagaatccacaccggggagaagccttacgagtgcagcgactgcgggaaagccttcaacgacccttcagcccttaggagccacgcaagaactcacctcaaagagaagccctttgactgcagtcagtgtggaaatgcattccggaccctctcggccctgaaaatccacatgcgagttcacactggcgagaggccttacaagtgtgatcagtgcgggaaggcttacggccggagctgccacctcatcgcacacaagagaacgcacaccggagagaggccctacgagtgtcacgactgtgggaaagctttccagcacccctcccacctcaaagagcacgtgaggaatcacacgggggagaagccctacgcgtgcacgcagtgcggcaaagccttccgctggaagtccaactttaatttgcacaagaagaaccacatggtggagaagacctacgaatgtaaagaatgcgggaaatcctttggcgatctcgtgtcccggaggaaacacatgaggattcacatcgtcaagaaacccgtggaatgtcggcagtgcgggaagaccttccgaaaccagtccatccttaagactcacatgaactctcacactggagagaaaccatacgggtgcgatctctgcgggaaagctttcagcgcgagttcaaacctcaccgcacacaggaagatacacacgcaagagagacgctacgaatgcgccgcctgcgggaaagtcttcggtgactatttatcccggcggaggcacatgagcgttcaccttgtaaagaaacgagttgagtgtaggcagtgtggcaaggccttcaggaaccagtcaacgctgaagacgcacatgcgaagccacacgggggagaaaccgtacgaatgcgatcactgtgggaaggccttcagcataggctccaacctgaatgtgcacaggcggatccacaccggggagaagccctacgaatgccttgtctgcgggaaagccttcagcgaccactcatccctcaggagccacgtgaaaactcaccggggagagaagctctttgtgtcatccgtgtggaaaaggctccagtgagcgcgcctgctttagagacacaggatgattcagaccggaaacagacctcgtgggtgtaagaggaagcctctgtgagctcgcaccttactgggtgcaaaagaatccacggaacttgggagaagtccagttcctgtaaaaactgggaagacgaggcgttctcatcccataggaggtttgtgagaactcacgccgggggtgaaaatgtacgtctgtagcatggagaagccttcagggtacattcagctcttaacaaacacaggaggacttaatggcagcttggcatttaatgtcaaaatccaagccgtggcatttaatgtcaaaatgacttcagaccacttctagccttctgggcccatgagtaataatgagcacactagggagcatctctgtaaacacagtggctggggaaacccttcctagtctcacttgattcctcatgacggaaatcacactaaagagagaaatcagtgaagtaaggaacgtggaaggtcatgaatgggccgcaaaccacggccagctgcttgtctttgtatggcttgccagctaacaatagtggttccatctttaaggaagaagaatgtttgatggagaaaatttgtggccaatgaagtctgaaatacttcctgtcatctgcccctttccagaaaaacttggccgacccttggtctacagcacgggttctcagtcgggcgacgatttggctgtctaggcgtcatttggcaatgtctagagacatttttggtagttagaatggggggaagatactcctgacttgtaataagaagacatcagagatgctgctaagtcggctccagcacacaggagccccccacaacgaagagttagtgcccccaaacgtcactgttgctgaggttgaaaataatcatgcagtcattcctcaattactgcctgcagcaattcctccatttttatgaatcttgtgagcacttacgctaggagaaatttcttttacaaaacttttaaaatacaattagtgctgataattcctatgtggaaatgattccagccatggtcccctcacttgagcatgtgaatattctcacggagagaagccccagcgagattttccggtgaatacgggattgcacttactctttcatcacggaaacagaccccccgagagaagccccaacgagattttccggtgaatacgggactgcacgtactctctcatcatgaaaacagagccccgttcataaatttttcatctttatttttaaggttatactcctctaaataacccttaagcctcatcaagaaaggtttgtttatagtatttttactatagcttcatccttgataacgtcctaatttccttctggacaacctccttgaccaatggcatattgagatctatgtgacatgaggatatttctcagtaccactttgttactggtacctgatgcacacggattgcgaccagagcatgatgcctccatcaagtggtaatatgtttgcagcctgctgtccagccaagagtgacagatacttctagtgacttccccggtatccactctcatcttcttccaatatcaagagaatccaggttctgtcagattagtaaggtgtgctaatctaaattttaaaaaatctcttacaggttttcttgcagctggtaccatccatgtctcacagccctggccactgacagatcagcagatgtcaccacatgggcttctgagaaagctcttgaatggggatcgttcttaaacatgaattcctccctgtatgttttgttctttgctttacttttcaccttgcaaagagatccagtacctagtattggaagatccaccttaacgaccgtgcatatgaaaaccacagtctaaggaagtgactgcagaaagctcacagcgaccctggcctcccctgtggcctctttgagtgtctgcagcagccctggacttccagacttctatcacatgagaaaaaataaaactgattattggtttaagctgctaaaaaaaaaaaaaaaaaaaaaaaa

SEQ ID NO: 69 - DNA, 1866 bp, Homo sapiens
cgctgttgccatggcagtgtggtcctggctgccgcggaggcaggtgccggggtctcctttgcctcaatgtgaagagcttagaaagaggaggagaggagaactcccccggccatctctgtgatcccagccgccgcattttacacagcatatttccttcacaaacagaaaatgaatgaaaataaagatactgattcaaagaaaagtgaagaatacgaagatgactttgaaaaggacctggagtggttaattaatgaaaatgaaaaaagtgatgccagcataatagagatggcttgtgagaaggaagagaatattaaccaagacttaaaagagaatgagacagtaatggagcacaccaaacggcattctgatcctgacaaatctttgcaggatgaggtctcaccaagaagaaatgacatcatttctgtaccaggtattcaacctttggatcccatatcagattcagatagtgaaaactctttccaggaatccaaactagaaagccagaaagacttggaggaggaagaggatgaggaagtaaggagatatattatggagaaaattgtacaagctaacaagcttctacagaatcaagaaccggtgaatgataaaagggagcgaaaacttaagttcaaggaccagttagttgatttggaagttcctccactagaagacactactacttttaaaaattattttgaaaacgaaaggaatatgtttgggaaactgtcacaattatgtatttccaatgattttggacaagaagatgtgctcctgtcacttactaatggaagctgtgaagaaaacaaggataggacaatactggtagagagagatggaaaatttgaacttctgaatttacaagacattgccagtcaggggtttttgcctcccattaataatgcaaatagtacagaaaatgaccctcagcagttgttacccagatcttccaactcctctgtcagtggcaccaagaaagaagattctacagcaaagattcatgctgtcactcactcatcaacaggagagccgctggcttatatcgctcagccaccactcaaccgcaagacttgtccaagctctgctgtcaactcagatcgaagtaaagggaatgggaaatctaatcacaggacacagtctgcacatatctcaccagtgacttcaacatactgtctttcccctcgacagaaagaactacaaaaacaactagaagaaaagagagaaaaactgaaaagagaggaagagcgacgaaaaatagaagaagagaaagaaaaaaagagagagaatgacatagtatttaaagcgtggttgcaaaagaaaagagagcaggtcttagaaatgaggagaattcagcgagcaaaggaaattgaagacatgaacagtagagaaaacagagatccacaacaagcttttcgattatggcttaaaaaaaagcacgaagagcagatgaaagaaagacagacagaagaactaagaaagcaagaggaatgtttattcttccttaaaggaacagaaggccgggaaagggcctttaaacaatggttaagaaggaaacggatggaaaaaatggcagagcaacaagctgtcagagagagaactagacagctccgactagaagctaagcgttctaaacagttacagcaccacctatatatgtcagaagccaaaccttttcgttttactgatcattataactgaaagtttctattaaatatttcagtgggcagctgctatcaaaattttggatatgatttcttagggtctgtgtactttggttgtattctaaattatggaaatggtatttatcttttattgacagtgaatttgtttttttaatactagaacaaaataaatttttttctcacagtg

SEQ ID NO: 70 - DNA, 2829 bp, Homo sapiens
actaaactagcttccccttagtacattgaaattcaaagtcatgcttgtaactgttaatgaaagcagatttaaagcaacaccaccatcactggagtatttttagttatatacgattgagactaccaagcatgttgctcttattcagtgtaatcctaatctcatgggtatccactgttgggggagaaggaacactttgtgattttccaaaaatacaccatggatttctgtatgatgaagaagattataaccctttttcccaagttcctacaggggaagttttctattactcctgtgaatataattttgtgtctccttcaaaatccttttggactcgcataacatgcacagaagaaggatggtcaccaacaccgaagtgtctcagaatgtgttcctttccttttgtgaaaaatggtcattctgaatcttcaggactaatacatctggaaggtgatactgtacaaattatttgcaacacaggatacagccttcaaaacaatgagaaaaacatttcgtgtgtagaacggggctggtccactcctcccatatgcagcttcactaaaggagaatgtcatgttccaattttagaagccaatgtagatgctcagccaaaaaaagaaagctacaaagttggagacgtgttgaaattctcctgcagaaaaaatcttataagagttggatcagactcagttcaatgttaccaatttgggtggtcacctaactttccaacatgcaaaggacaagtacgatcatgtggtccacctcctcaactctccaatggtgaagttaaggagataagaaaagaggaatatggacacaatgaagtagtggaatatgattgcaatcctaattttataataaacgggcctaagaaaatacaatgtgtggatggagaatggacaactttacccacttgtgttgaacaagtgaaaacatgtggatacatacctgaactcgagtacggttatgttcagccgtctgtccctccctatcaacatggagtttcagtcgaggtgaattgcagaaatgaatatgcaatgattggaaataacatgattacctgtattaatggaatatggacagagcttcctatgtgtgttgcaacacaccaacttaagaggtgcaaaatagcaggagttaatataaaaacattactcaagctatctgggaaagaatttaatcataattctagaatacgttacagatgttcagacatcttcagatacaggcactcagtctgtataaacgggaaatggaatcctgaagtagactgcacagaaaaaagggaacaattctgcccaccgccacctcagatacctaatgctcagaatatgacaaccacagtgaattatcaggatggagaaaaagtagctgttctctgtaaagaaaactatctacttccagaagcaaaagaaattgtatgtaaagatggacgatggcaatcattaccacgctgtgttgagtctactgcatattgtgggccccctccatctattaacaatggagataccacctcattcccattatcagtatatcctccagggtcaacagtgacgtaccgttgccagtccttctataaactccagggctctgtaactgtaacatgcagaaataaacagtggtcagaaccaccaagatgcctagatccatgtgtggtatctgaagaaaacatgaacaaaaataacatacagttaaaatggagaaacgatggaaaactctatgcaaaaacaggggatgctgttgaattccagtgtaaattcccacataaagcgatgatatcatcaccaccatttcgagcaatctgtcaggaagggaaatttgaatatcctatatgtgaatgaagcaagcataattttcctgaatatattcttcaaacatccatctatgctaaaagtagccattatgtagccaattctgtagttacttcttttattctttcaggtgttgtttaactcagttttatttagaactctggatttttagagctttagaaatttgtaagctgagagaacaatgtttcacttaataggagggtgtcttagtccatattacattgttataacagagtatcacagactggataacttctaaccaatagtttatttgtttcataaatctaaaagctgagaagtccaagatggtggggctgcctctggtgagggtcttctcgaagcatcataatatgctggaaggcatcacaacatggtggaagggatcacgtggcaaaagagcatgtacatgggagtgagagaaaaagagagagagagacagagtggcgggggcggggaggagcgcaaactcatcctttataaagacaccactcctgagataacaatccaatcccatgataatgacattaatccattcaagaagatagagctctcgtgacttaatcaccttctaaagatctcacctgacaacactgttgcattggcagttaagtttccacgtaaactttcggggacacattcaaaccacaggagaaactcaaattgttcctgggcaaatcacaacatggggaattttattcataaatgtccacagaaacagtaaatgttctcgcttcagtacttaattcatctaatccctcctgtttgtctcaaattataggataactttgaaactttctgaattaacgttatttaaaaggaaatgtagatgttattttagtctctatcttcatgttattatcacttaaaaacctgcgaaagctgtcaacttttgtggttgtagcaagtattaataaatatttataaatcctctaatgtaagtctagctacctatccaatactaaataccccttaaagtattaaatgcactatctgctgtaaa

SEQ ID NO: 71 - DNA, 1511 bp, Homo sapiens
gtatttgggacatgtaagtggagaggcatgaacctgattcatttcctgatccagtgatgctcccagcccacccccaaacagacacagcgtagcccgggccagctcttaaggagttcaggagtgagaagaggccctcagagatctgacagcctaggagtgcgtggacaccacctcagcccactgagcaggagtcacagcacgaagaccaagcgcaaagcgacccctgccctccatcctgactgctcctcctaagagagatggcaccggccagagcaggattctgcccccttctgctgcttctgctgctggggctgtgggtggcagagatcccagtcagtgccaagcccaagggcatgacctcatcacagtggtttaaaattcagcacatgcagcccagccctcaagcatgcaactcagccatgaaaaacattaacaagcacacaaaacggtgcaaagacctcaacaccttcctgcacgagcctttctccagtgtggccgccacctgccagacccccaaaatagcctgcaagaatggcgataaaaactgccaccagagccacggggccgtgtccctgaccatgtgtaagctcacctcagggaagtatccgaactgcaggtacaaagagaagcgacagaacaagtcttacgtagtggcctgtaagcctccccagaaaaaggactctcagcaattccacctggttcctgtacacttggacagagtcctttaggtttccagactggcttgctctttggctgaccttcaattccctctccaggactccgcaccactcccctacacccagagcattctcttcccctcatctcttggggctgttcctggttcagcctctgctgggaggctgaagctgacactctggtgagctgagctctagagggatggcttttcatctttttgttgctgttttcccagatgcttatccccaagaaacagcaagctcaggtctgtgggttccctggtctatgccattgcacatgtctcccctgccccctggcattagggcagcatgacaaggagaggaaataaatggaaagggggcatatgggatttgtggacacagctgtttctgttcctgaactagaagtcttccccagctctgacgtggcagtgaggtgacctgaaggaaagaaaaatataaataaataccacttcatatttgtatagaatcctctaatcccttgtgacatagacttgacagggattgtatgccttctttatggatgaggaaattaaggttttagaaagcttaatgaattaaagagcttgtctaattagttagtagcagaacctggacttgaacctaggtctccttgctctaaatacagtgtaccttctactctaccagttgcgcaagaaagaagtcactgttacagaggcaagcggtgaactaggtaagagttcactcatgaagaaacgagtgctctgaagagccagttaccctgtgttggctgcaataaaggtcattacctctctagccaaaaaaaaaaaaaaa

SEQ ID NO: 72 - DNA, 4449 bp, Homo sapiens
gttaccatagcgacgtgcacgcagtagccaggcctgacccgctggtcccttgctggcgggaggaaagaggcggcaccatgagccacgcagtaaccatcgaggagccccaggcccagccgcaggtgtctcaaactcggtaccgggagaggtcgcgggctgggagccacatctcctccaatcgagcgtatgattttctgtacgatccattgtttattgtgtcaagtgagaaagaccatacacaggcaaatatccaagctaccctgattcgcagcagactgagaaaagttcccaggtttaaaaccatgttcagtaacctgatccattatccaagatattctctatattggagcaagtcagatcctgtcccaccatttatcagtcgggaatggaagggacataaggagaaacacagagaagccctccggcagctcaccacaactgacgcttcttttcagatgcctaaagaagtttatgaagatcctgaagttactggaaagaatcgctataaatactttgaaaggccttttctcccattttttcagcagatgccattcaatgttgtttatgccgtatccaaggcagaaccatacacttttcctcctacttctactaagcacctatccatcccttcaaagtctactgtgggcactcagactgattatcgggatgctgacgttcaaacagatccatactctccagaatatgtagtatgtcaggactcaatccctgagctcttgaccctggctacgcttacttggggtcggggtctcccagcaggacaagctgaggtggagatgatagaaagagcccgcgagaagcgtgcttgggaagcctctctccccgctctgagtgacacctcccagtttgagaagaggaggaaaatgatgaatgaaatggagaggaaggagtgggccttcagagagcaggagattgaaaaactgcaggagattcgcctggaagttctaaaagagctgttgaggaagcgtgaagagaatcagaatgaagtgaatatgaagcacttgaatgcccggtggtctaaactgcaggagggaaaagaggcaaaaatggcaaaaattcagcgcacgcatgtatcaacaatcagaaaacttgtaggaaagagaaagaatatagaagggaagttggagagaagaaatatcatcaaggattattctgattatgcatcacaggtctatggacctctgtctcgtcttgggtgtttcccagacaacaactcagaggactttgtagtaaaaaactactatctcaacacctatgaaggattagtggaacttgagtcatgtctcccagattttgtgacacaaccccaaatcagagctccaaaacctaaagtcattaccaccaaagctggttttctgaagagggcagcaaggttggactatgagttggcagaggttcataaggcactgttggataagaagaataaagttcttgaagtaaagaaaccccctcgcttccttcaaagaaacccaatacctcaacctcggcttccaactccaaccttggaaatgacgtccaatgaagaagaagaaatggaaatggctgtgatctaccttcaaaagttactccggggcagagtcgttcagaacatgatgtttgaagggaaagaaaagcgactggagttgatccaggagttgcgcacctgccacgcactacaagaagatgaaaagctggtgaaaaaagccgagaagcaagtgaccctggccttacagcggcagaggaacttgcatgagcacaaggtgtcactggttgaaaaccatttggccggactggaaggaagggcactagcagacatgtttgacttcctgtccaaagagctggtgagactgcaggaggagaggaggatccatgcctttgtcatgctggctgagcgccagcggcgggtacgagaggctgaagagagtggtcggcgccaggtggaaaaacagcgcctgcgggaggaggacgagatatttaaggaggtggttaaagttcaccatagtactataagctcctacctagaagacataatactgaataccgaagcgaatactgcagaagaacaagccagggcagaaatagagaagatggctgagaaaatcaatgacattgcttatgaaatggaaagccgccgaacctatcttcagtcagaggagattgttgctgagttggtttatagttttctgatcccagaggtgcaaaaatactttgtcaaagaaaaagtgaggaacgcacagcggaaacatattcttgcagcccatcagatcatccacagttacacggaaagcatggttcaaaagaaattaactgagggagagcaagatgaggcctcaaatgctgccatgttacttgagaaagaaactcaaaatgagaacaacagctaagattgtgatttttttgtaaaagaagctgtacgaatcatcataaataattccaatagtctgcacttctcccaaggtgtgcactgctcataaacttgccagtgtgtgattcatgagaaaggagatttattttccttaaacatccaataatttaaaatgattttcaataataataatcaaatgaaaaagcttcattctcttcagtgtcttctagatgccctacttaaagagaacattttcttatgtctcatttcaatattttgttaactatgaggatgtgctggtttgttgaatcaaacaaaaggaaatgttgtggaatatttttccaagtagttttggttcactattcacaggacattggcattatctactaaggctgaaaatgtgcatattccatgactcaggattttatctcctagatatatattcaacagaaatgcatgagtatgtgcaccaacaggcatgacaaaaatatttatagtagtggtgttcacaatagtcccaaactggaaacccaagtgtccatctccatcggaacagaaaactatactttggtctgcttctacagtggcacatcaacccacctttgagctttagatctaagaagtgtgttcatgcaacagccatagagatggtgctattgaaaggcaatctgcccatcctgtgtattgacaagcatcaggattccaggaggattcttcctgattcaaagactgtcaaataggaaaaaagaaaacagtaaatgaacaaaaacatcaacatggagtccaagtaatgaatttatagaggaaaatgtatgctactctgaaaacaaagcttatgttagagaatatcttactgtaagaaacaaggaaaattgcagaaacatttgctgagtgtttttaataggagtcaaaaagaaagggtcttttcagaaactgaagtaggaaataataacagacaaggtcaaaaaatagatgcaggctgaaaagaaaaggaagtgggctaagatgggaaaaatataaaaagatttaaaatccagcaacaaaatttacacattcatttggatgcagtgaaaagggcagaaataccacagcagagaataaaattgataatgttggcaacacatttattaagtgatccaacatgggatgggaaggaatgggcaaagagattaaaatgacagaagttagctgtagatgacctatcccacagcaatcggagttcttgaagaagaaaccagaacaaataaaatagaaacaataatcagagtttaataattaattttctgagtttttttttaaaaaaactaattatacaaacttgaaagggttcaccttgccctagcaaaactaggattgggacacctttttttccccctgaggatcactgacaaaaaacactgcaccagtaaggaagcaactaaattttgttttgttctttgaaaaaggctaacctgagctaggtaaaggttatatcattcacttttgaaataaaccatcgagaacacaaaatgacaagtgagttaggttgggctgatgggatagaaggtgggaggggaatgctatacagctgggaacagcagactttctctgaagggccagatggtaactacattagggtttgcgggtctgatggtcgccatcataactgcatactcaactctgccgttgtagggtaagagcagcactcgatgacacagaaatgaatgcacatgactgtgttccagtaaaattttattttaattaaaatcaattcatgtttgaaaaaggatttaaagtagcttctaataaaggacatgtgtaatgaaacttaaaatatgatattttctttaaaaatctttatccttatgtagacttctaaaactatgttttgcatttagacagtcaaggaaaatacaagttgttatacaattctcattgactaattgaagtttactaggagaggaaaactttttcttgataccggcaatcttttacttataatggcttgagttaaaatgctccaacttttctaatttttgcttttgaaaataaaacacctatagtgacaataaaaacacacatttaaagccaaaaaaaaaaaaaaaaaa

SEQ ID NO: 73 - DNA, 1931 bp, Homo sapiens
gatccccgccccctccgcccgcgccccgcccctcgcagcccagttccggacgcgggcccagccgcgcctgcgcctccgctcgcctgtggctgcgtcgcgcgctcttcctcggagctacccaggcggctggtgtgcagcaagctccgcgccgacccctgacgcctgacgcctgtccccggcccggcatgagccgctacctgctgccgctgtcggcgctgggcacggtagcaggcgccgccgtgctgctcaaggactatgtcaccggtggggcttgccccagcaaggccaccatccctgggaagacggtcatcgtgacgggtgccaacacaggcatcgggaagcagaccgccttggaactggccaggagaggaggcaacatcatcctggcctgccgagacatggagaagtgtgaggcggcagcaaaggacatccgcggggagaccctcaatcaccatgtcaacgcccggcacctggacttggcttccctcaagtctatccgagagtttgcagcaaagatcattgaagaggaggagcgagtggacattctaatcaacaacgcgggtgtgatgcggtgcccccactggaccaccgaggacggcttcgagatgcagtttggcgttaaccacctgggtcactttctcttgacaaacttgctgctggacaagctgaaagcctcagccccttcgcggatcatcaacctctcgtccctggcccatgttgctgggcacatagactttgacgacttgaactggcagacgaggaagtataacaccaaagccgcctactgccagagcaagctcgccatcgtcctcttcaccaaggagctgagccggcggctgcaaggctctggtgtgactgtcaacgccctgcaccccggcgtggccaggacagagctgggcagacacacgggcatccatggctccaccttctccagcaccacactcgggcccatcttctggctgctggtcaagagccccgagctggccgcccagcccagcacatacctggccgtggcggaggaactggcggatgtttccggaaagtacttcgatggactcaaacagaaggccccggcccccgaggctgaggatgaggaggtggcccggaggctttgggctgaaagtgcccgcctggtgggcttagaggctccctctgtgagggagcagcccctccccagataacctctggagcagatttgaaagccaggatggcgcctccagaccgaggacagctgtccgccatgcccgcagcttcctggcactacctgagccgggagacccaggactggcggccgccatgcccgcagtaggttctagggggcggtgctggccgcagtggactggcctgcaggtgagcactgccctgggctctggctggttccgtctgctctgctgccagcaggggagaggggccatctgatgcttcccctgggaatctaaactgggaatggccgaggaggaaggggctccgtgcacttgcaggccacgtcaggagagccagcggtgcctgtcggggagggttccaaggtgctccgtgaagagcatgggcaagttgtctgacacttggtggattcttgggtccctgtgggaccttgtgcatgcatggtcctctctgagccttggtttcttcagcagtgagatgctcagaataactgctgtctcccatgatggtgtggtacagcgagctgttgtctggctatggcatggctgtgccgggggtgtttgctgagggcttcctgtgccagagcccagccagagagcaggtgcaggtgtcatcctgagttcaggctctgcacggcatggagtgggaaccccaccagctgctgctacaggacctgggattgcctgggactcccaccttcctatcaattctcatggtagtccaaactgcagactctcaaacttgctcatttaaaagaaaaaaaaaagaag

SEQ ID NO: 74 - DNA, 2023 bp, Homo sapiens
aggtgtgagacagtcacgttgatggtgacagcagcagtgaccgtagcagcctagaggtggccgaatgcttactctaatgggctggcccatccctgagtgtctagagttcccagcccgcttaaggaaggaaggaaaacacaggcagctctaagtgtacgacgagggaggtctcatcggcggtgaggaagcccaggcgggtccccttcccagctgaaaggggttcggaatttcactctgtcgccaggctggaatgcagtagggcaatctcggctcactgcaacctccacctcccgagttcaagtgatgctcctgcttcggcctcctgagtagctgggactacagggactatgtcaccggtggggcttgccccagcaaggccaccatccctgggaagacggtcatcgtgacgggtgccaacacaggcatcgggaagcagaccgccttggaactggccaggagaggaggcaacatcatcctggcctgccgagacatggagaagtgtgaggcggcagcaaaggacatccgcggggagaccctcaatcaccatgtcaacgcccggcacctggacttggcttccctcaagtctatccgagagtttgcagcaaagatcattgaagaggaggagcgagtggacattctaatcaacaacgcgggtgtgatgcggtgcccccactggaccaccgaggacggcttcgagatgcagtttggcgttaaccacctgggtcactttctcttgacaaacttgctgctggacaagctgaaagcctcagccccttcgcggatcatcaacctctcgtccctggcccatgttgctgggcacatagactttgacgacttgaactggcagacgaggaagtataacaccaaagccgcctactgccagagcaagctcgccatcgtcctcttcaccaaggagctgagccggcggctgcaaggctctggtgtgactgtcaacgccctgcaccccggcgtggccaggacagagctgggcagacacacgggcatccatggctccaccttctccagcaccacactcgggcccatcttctggctgctggtcaagagccccgagctggccgcccagcccagcacatacctggccgtggcggaggaactggcggatgtttccggaaagtacttcgatggactcaaacagaaggccccggcccccgaggctgaggatgaggaggtggcccggaggctttgggctgaaagtgcccgcctggtgggcttagaggctccctctgtgagggagcagcccctccccagataacctctggagcagatttgaaagccaggatggcgcctccagaccgaggacagctgtccgccatgcccgcagcttcctggcactacctgagccgggagacccaggactggcggccgccatgcccgcagtaggttctagggggcggtgctggccgcagtggactggcctgcaggtgagcactgccctgggctctggctggttccgtctgctctgctgccagcaggggagaggggccatctgatgcttcccctgggaatctaaactgggaatggccgaggaggaaggggctccgtgcacttgcaggccacgtcaggagagccagcggtgcctgtcggggagggttccaaggtgctccgtgaagagcatgggcaagttgtctgacacttggtggattcttgggtccctgtgggaccttgtgcatgcatggtcctctctgagccttggtttcttcagcagtgagatgctcagaataactgctgtctcccatgatggtgtggtacagcgagctgttgtctggctatggcatggctgtgccgggggtgtttgctgagggcttcctgtgccagagcccagccagagagcaggtgcaggtgtcatcctgagttcaggctctgcacggcatggagtgggaaccccaccagctgctgctacaggacctgggattgcctgggactcccaccttcctatcaattctcatggtagtccaaactgcagactctcaaacttgctcatttaaaagaaaaaaaaaagaag

SEQ ID NO: 75 - DNA, 3602 bp, Homo sapiens
gataggcgccgggcagctgagctggtaggaggaccagacggggatgttcggctccgccccccagcgtcccgtggccatgacgaccgctcagagggactccctgttgtggaagctcgcggggttgctgcgggagtccggggatgtggtcctgtctggctgtagcaccctgagcctgctgactcccacactgcaacagctgaaccacgtatttgagctgcacctggggccatggggccctggccagacaggctttgtggctctgccctcccatcctgccgactcccctgttattcttcagcttcagtttctcttcgatgtgctgcagaaaacactttcactcaagctggtccatgttgctggtcctggccccacagggcccatcaagattttccccttcaaatcccttcggcacctggagctccgaggtgttcccctccactgtctgcatggcctccgaggcatctactcccagctggagaccctgatttgcagcaggagcctccaggcattagaggagctcctctcagcctgcggcggcgacttctgctctgccctcccttggctggctctgctttctgccaacttcagctacaatgcactgaccgccttagacagctccctgcgcctcttgtcagctctgcgtttcttgaacctaagccacaatcaagtccaggactgtcagggattcctgatggatttgtgtgagctccaccatctggacatctcctataatcgcctgcatttggtgccaagaatgggaccctcaggggctgctctgggggtcctgatactgcgaggcaatgagcttcggagcctgcatggcctagagcagctgaggaatctgcggcacctggatttggcatacaacctgctggaaggacaccgggagctgtcaccactgtggctgctggctgagctccgcaagctctacctggaggggaaccctctttggttccaccctgagcaccgagcagccactgcccagtacttgtcaccccgggccagggatgctgctactggcttccttctcgatggcaaggtcttgtcactgacagattttcagactcacacatccttggggctcagccccatgggcccacctttgccctggccagtggggagtactcctgaaacctcaggtggccctgacctgagtgacagcctctcctcagggggtgttgtgacccagcccctgcttcataaggttaagagccgagtccgtgtgaggcgggcaagcatctctgaacccagtgatacggacccggagccccgaactctgaacccctctccggctggatggttcgtgcagcagcacccggagctggagctcatgagcagcttccgggaacggttcggccgcaactggctgcagtacaggagtcacctggagccctccggaaaccctctgccggccacccccactacttctgcacccagtgcacctccagccagctcccagggccccgacactgcacccagaccttcacccccgcaggaggaagccagaggcccccaggagtcaccacagaaaatgtcagaggaggtcagggcggagccacaggaggaggaagaggagaaggaggggaaggaggagaaggaggagggggagatggtggaacagggagaagaggaggcaggagaggaggaagaagaggagcaggaccagaaggaagtggaagcggaactctgtcgccccttgttggtgtgtcccctggaggggcctgagggcgtacggggcagggaatgctttctcagggtcacttctgcccacctgtttgaggtggaactccaagcagctcgcaccttggagcgactggagctccagagtctggaggcagctgagatagagccggaggcccaggcccagaggtcgcccaggcccacgggctcagatctgctccctggagcccccatcctcagtctgcgcttctcctacatctgccctgaccggcagttgcgtcgctatttggtgctggagcctgatgcccacgcagctgtccaggagctgcttgccgtgttgaccccagtcaccaatgtggctcgggaacagcttggggaggccagggacctcctgctgggtagattccagtgtctacgctgtggccatgagttcaagccagaggagcccaggatgggattagacagtgaggaaggctggaggcctctgttccaaaagacagaatctcctgctgtgtgtcctaactgtggtagtgaccacgtggttctcctcgctgtgtctcggggaacccccaacagggagcggaaacagggagagcagtctctggctccttctccgtctgccagccctgtctgccaccctcctggccatggtgaccaccttgacagggccaagaacagcccacctcaggcaccgagcacccgtgaccatggtagttggagcctcagtcccccccctgagcgctgtggcctccgctctgtggaccaccgactccggctcttcctggatgttgaggtgttcagcgatgcccaggaggagttccagtgctgcctcaaggtgccagtggcattggcaggccacactggggagttcatgtgccttgtggttgtgtctgaccgcaggctgtacctgttgaaggtgactggggagatgcgtgagcctccagctagctggctgcagctgaccctggctgttcccctgcaggatctgagtggcatagagctgggcctggcaggccagagcctgcggctagagtgggcagctggggcgggccgctgtgtgctgctgccccgagatgccaggcattgccgggccttcctagaggagctccttgatgtcttgcagtctctgccccctgcctggaggaactgtgtcagtgccacagaggaggaggtcaccccccagcaccggctctggccattgctggaaaaagactcatccttggaggctcgccagttcttctaccttcgggcgttcctggttgaaggcccttccacctgcctcgtatccctgttgctgactccgtccaccctgttcctgttagatgaggatgctgcagggtccccggcagagccctctcctccagcagcatctggcgaagcctctgagaaggtgcctccctcggggccgggccctgctgtgcgtgtcagggagcagcagccactcagcagcctgagctccgtgctgctctaccgctcagcccctgaggacttgcggctgctcttctacgatgaggtgtcccggctggagagcttttgggcactccgtgtggtgtgtcaggagcagctgacagccctgcttgcctggatccgggaaccatgggaggagctgttttccatcggactccggacagtgatccaagaggcgctggcccttgaccgatgagggtcccacgctgaccttggccctgacctcaggagccacgctgtagacattccctctcctggtctctgggtctggcttccaggctctggctgtggatgtcttcagcctctgggtgctggccagtgaggtcccaaatgacccagggcttaagggagaggcgagagaatgatctggcctcaggggacaggccacctggtcaggaggaatatttttcctgcactttttctcaggtatcaataaagttgtttccaactcataa

SEQ ID NO: 76 - DNA, 2248 bp, Homo sapiens
gacgccgccagctcttcactccacgcccacctctctcctggagcgctgggccttcgctggccgcaccggcagccatgagctcggagatggagccgctgctcctggcctggagctattttaggcgcaggaagttccagctctgcgccgatctatgcacgcagatgctggagaagtccccttatgaccaggaaccagatcctgaattgccagtgcatcaggcagcttggatcttaaaagcaagagcgctaacagaaatggtatacatagatgaaattgatgtagatcaggaaggaattgcagaaatgatgctggatgaaaatgctatagctcaagttccacgccctggaacgtctttgaaactccctggaactaatcagacaggagggcctagccaggccgttaggccaatcacacaagctggaagacccattacaggtttcctcaggcccagcacgcagagtggaaggccaggcactatggaacaggctatcagaacacccagaaccgcctacacagcccgccctatcaccagctcctccggaagatttgtcaggctgggaacggcttccatgcttacaagtcctgatggaccatttataaatttatctaggctgaatttaacaaagtattcccagaaacctaagttggcaaaggctttgtttgagtatatctttcatcatgaaaatgatgttaagactgctttggatctggctgccctctccacagaacattctcagtacaaggactggtggtggaaagtacagattggaaaatgttactacaggttgggaatgtatcgtgaagcagaaaaacagtttaaatcagccctgaagcagcaggaaatggtagatacatttctgtacttggcaaaagtttatgtctcattggatcaacctgtgactgctttaaatcttttcaaacaaggcttagataagtttccaggagaagtaaccctgctctgtggaattgcaagaatctatgaggaaatgaacaatatgtcatcagcagcagaatattacaaagaagttttgaaacaagacaatactcatgtggaagccatcgcatgcattggaagcaaccacttctattctgatcagccagaaatagctctccggttttacaggcggctgctgcagatgggcatttataacggccagctttttaacaatctggggctgtgttgcttctatgcccagcagtatgatatgactctgacctcatttgaacgtgccctttctttggctgaaaatgaagaagaggcagctgatgtctggtacaacttgggacatgtagctgtgggaataggagatacaaatttggcccatcagtgcttcaggctggctctggtcaacaacaacaaccacgccgaggcctacaacaacctggctgtgctggagatgcggaagggccacgttgaacaggcaagggcactattacaaactgcatcatcattagcaccccatatgtatgaaccgcattttaattttgcaacaatctctgataagattggagatctgcagagaagctatgttgctgcgcagaagtctgaagcagcatttccagaccatgtggacacacaacatttaattaaacaattaaggcagcattttgctatgctctgattgttccttagaccacatatgttcttatgaagcagcattatgcaaggggaaaaaagcactatgtctgtgtatgtatgtatatagtgtaatacgtatattttaacaaacctgtccttgatattagttaaggtgacacataagggtgacacagaatgtgtaatgcaaatttcatagtaatagtaactttataaaataatattataaaatacaggatttaaacctttctaaatagatcctgaaactgtctctcacattatatagtagatgtttgtttataatgtttacaaaacattttggtgaatttcctcaatgttttataaatgtacattttttaagtccttaagctgactcttagccatcatgtagcttaaggagtctgaaatctgccattaaaactgcacctttaagccaggtgtggtagcatgtgcctatagtcccagctacttgggaggtggaggtgggaggattataaatagagactttccttaagactttaaaaatgtatttaaaactattttttattaaatactttgtgatttcctattaagctttaaaataaatcattgtgtaaaacaccatcaaaaaaaaaaaaaaaaaaaaaaaaaaaaaaaaaaaaaaaaaaaaaa

SEQ ID NO: 77 - DNA, 2218 bp, Homo sapiens
gacgccgccagctcttcactccacgcccacctctctcctggagcgctgggccttcgctggccgcaccggcagccatgagctcggagatggagccgctgctcctggcctggagctattttaggcgcaggaagttccagctctgcgccgatctatgcacgcagatgctggagaagtccccttatgaccaggcagcttggatcttaaaagcaagagcgctaacagaaatggtatacatagatgaaattgatgtagatcaggaaggaattgcagaaatgatgctggatgaaaatgctatagctcaagttccacgccctggaacgtctttgaaactccctggaactaatcagacaggagggcctagccaggccgttaggccaatcacacaagctggaagacccattacaggtttcctcaggcccagcacgcagagtggaaggccaggcactatggaacaggctatcagaacacccagaaccgcctacacagcccgccctatcaccagctcctccggaagatttgtcaggctgggaacggcttccatgcttacaagtcctgatggaccatttataaatttatctaggctgaatttaacaaagtattcccagaaacctaagttggcaaaggctttgtttgagtatatctttcatcatgaaaatgatgttaagactgctttggatctggctgccctctccacagaacattctcagtacaaggactggtggtggaaagtacagattggaaaatgttactacaggttgggaatgtatcgtgaagcagaaaaacagtttaaatcagccctgaagcagcaggaaatggtagatacatttctgtacttggcaaaagtttatgtctcattggatcaacctgtgactgctttaaatcttttcaaacaaggcttagataagtttccaggagaagtaaccctgctctgtggaattgcaagaatctatgaggaaatgaacaatatgtcatcagcagcagaatattacaaagaagttttgaaacaagacaatactcatgtggaagccatcgcatgcattggaagcaaccacttctattctgatcagccagaaatagctctccggttttacaggcggctgctgcagatgggcatttataacggccagctttttaacaatctggggctgtgttgcttctatgcccagcagtatgatatgactctgacctcatttgaacgtgccctttctttggctgaaaatgaagaagaggcagctgatgtctggtacaacttgggacatgtagctgtgggaataggagatacaaatttggcccatcagtgcttcaggctggctctggtcaacaacaacaaccacgccgaggcctacaacaacctggctgtgctggagatgcggaagggccacgttgaacaggcaagggcactattacaaactgcatcatcattagcaccccatatgtatgaaccgcattttaattttgcaacaatctctgataagattggagatctgcagagaagctatgttgctgcgcagaagtctgaagcagcatttccagaccatgtggacacacaacatttaattaaacaattaaggcagcattttgctatgctctgattgttccttagaccacatatgttcttatgaagcagcattatgcaaggggaaaaaagcactatgtctgtgtatgtatgtatatagtgtaatacgtatattttaacaaacctgtccttgatattagttaaggtgacacataagggtgacacagaatgtgtaatgcaaatttcatagtaatagtaactttataaaataatattataaaatacaggatttaaacctttctaaatagatcctgaaactgtctctcacattatatagtagatgtttgtttataatgtttacaaaacattttggtgaatttcctcaatgttttataaatgtacattttttaagtccttaagctgactcttagccatcatgtagcttaaggagtctgaaatctgccattaaaactgcacctttaagccaggtgtggtagcatgtgcctatagtcccagctacttgggaggtggaggtgggaggattataaatagagactttccttaagactttaaaaatgtatttaaaactattttttattaaatactttgtgatttcctattaagctttaaaataaatcattgtgtaaaacaccatcaaaaaaaaaaaaaaaaaaaaaaaaaaaaaaaaaaaaaaaaaaaaaa

SEQ ID NO: 78 - DNA, 2128 bp, Homo sapiens
gacgccgccagctcttcactccacgcccacctctctcctggagcgctgggccttcgctggccgcaccggcagccatgagctcggagatggagccgctgctcctggcctggagctattttaggcgcaggaagttccagctctgcgccgatctatgcacgcagatgctggagaagtccccttatgaccaggcagcttggatcttaaaagcaagagcgctaacagaaatggtatacatagatgaaattgatgtagatcaggaaggaattgcagaaatgatgctggatgaaaatgctatagctcaagttccacgccctggaacgtctttgaaactccctggaactaatcagacaggagggcctagccaggccgttaggccaatcacacaagctggaagacccattacaggtttcctcaggcccagcacgcagagtggaaggccaggcactatggaacaggctatcagaacacccagaaccgcctacacagcccgccctatcaccagctcctccggaagatttgtcaggctgggaacggctttgtttgagtatatctttcatcatgaaaatgatgttaagactgctttggatctggctgccctctccacagaacattctcagtacaaggactggtggtggaaagtacagattggaaaatgttactacaggttgggaatgtatcgtgaagcagaaaaacagtttaaatcagccctgaagcagcaggaaatggtagatacatttctgtacttggcaaaagtttatgtctcattggatcaacctgtgactgctttaaatcttttcaaacaaggcttagataagtttccaggagaagtaaccctgctctgtggaattgcaagaatctatgaggaaatgaacaatatgtcatcagcagcagaatattacaaagaagttttgaaacaagacaatactcatgtggaagccatcgcatgcattggaagcaaccacttctattctgatcagccagaaatagctctccggttttacaggcggctgctgcagatgggcatttataacggccagctttttaacaatctggggctgtgttgcttctatgcccagcagtatgatatgactctgacctcatttgaacgtgccctttctttggctgaaaatgaagaagaggcagctgatgtctggtacaacttgggacatgtagctgtgggaataggagatacaaatttggcccatcagtgcttcaggctggctctggtcaacaacaacaaccacgccgaggcctacaacaacctggctgtgctggagatgcggaagggccacgttgaacaggcaagggcactattacaaactgcatcatcattagcaccccatatgtatgaaccgcattttaattttgcaacaatctctgataagattggagatctgcagagaagctatgttgctgcgcagaagtctgaagcagcatttccagaccatgtggacacacaacatttaattaaacaattaaggcagcattttgctatgctctgattgttccttagaccacatatgttcttatgaagcagcattatgcaaggggaaaaaagcactatgtctgtgtatgtatgtatatagtgtaatacgtatattttaacaaacctgtccttgatattagttaaggtgacacataagggtgacacagaatgtgtaatgcaaatttcatagtaatagtaactttataaaataatattataaaatacaggatttaaacctttctaaatagatcctgaaactgtctctcacattatatagtagatgtttgtttataatgtttacaaaacattttggtgaatttcctcaatgttttataaatgtacattttttaagtccttaagctgactcttagccatcatgtagcttaaggagtctgaaatctgccattaaaactgcacctttaagccaggtgtggtagcatgtgcctatagtcccagctacttgggaggtggaggtgggaggattataaatagagactttccttaagactttaaaaatgtatttaaaactattttttattaaatactttgtgatttcctattaagctttaaaataaatcattgtgtaaaacaccatcaaaaaaaaaaaaaaaaaaaaaaaaaaaaaaaaaaaaaaaaaaaaaa

SEQ ID NO: 79 - DNA, 7171 bp, Homo sapiens
ctgggcatccacttgacagccggcggcgctcgcggccctcagcatgttccgcgaggcgagggttttcctcccgcctgtgggctgaggcggcggcggcccccgaaacgagatgcacctgacgggcgcggcttagaggacgcggctggcgggaagtcccggcagccagcgggagggctttcgttgccgggccgccgccgcctcccgtcgccgccgcgggcccgagcgggagcggcgggtgggcgccccgacatggcggcccggagcgccccgagctgccacctgcggctcgagtgggtgtacggctaccggggccaccagtgccgcaacaacctctactacactgcggccaaggagatcgtatacttcgtggcgggggtcggcgtggtgtacagcccgcgggagcacaggcagaagttctaccggggccacagcgacgacatcatcagccttgcattgcatcctgaacgagtgttggtagcaacaggacaagttgggaaagagccttatatttgtatttgggattcatacactgtgcagaccatatcagttttaaaggatgttcatacacatggtatagcttgcttggcgtttgacttagatggacagcgcttggtttcagttggacttgattcaaagaatgcagtttgtgtttgggactggaaaaggggaaaaatgttgtctatggctcctggtcatacagatagaatatttgatatttcttgggatttgtaccagccaaataaacttgtcagctgtggtgtaaaacatatcaagttctggagtttatgtggaaatgctctgaccccaaaacgaggtgtctttggtaagacgggtgaccttcagacaatactgtgcctagcctgtgcaagggatgaattaacatattctggtgcactcaatggggatatatatgtttggaaaggaatcaatcttatacgaacaatacaaggagcccatgctgcaggaatttttagcatgaatgcttgtgaagaaggctttgctactggtggcagagatggttgtattcgtctttgggatttaacttttaaaccaattactgtgattgatctcagggaaacagaccagggatacaaaggtttgtctgtaaggagtgtgtgttggcgaggtgaccacattctagttggaacacaggacagtgaaatttttgaaattgtggtgcaagaaagaaataaaccttttctaattatgcaagggcattgtgaaggtgaactttgggcacttgctgtccatcctactaaacctttggctgtgactggaagtgatgatcgttcggtcaggatatggagcctagtagatcatgcattaatagcaaggtgtaatatggaagaaccaattcgttgtgcagctgtcaatgcagatggaatccatcttgcccttggaatgaaggatggctcattcactgtacttagagtaagagatatgacggaagttgtacatattaaagataggaaggaggcaattcatgagttaaaatattcaccagatggaacttaccttgctgttggatgcaatgacagctcggttgatatttatggagttgctcagcgttataaaaaagttggcgagtgtttgggatcccttagtttcatcactcatctggactggtcttcagacagtagatatttgcagacaaatgatggaaatgggaaaagacttttttatagaatgccaggaggaaaggaagtgacaagtacagaagaaataaaaggtgttcattgggcttcatggacatgtgtttcaggccttgaagtaaatggaatttggcccaagtattcagatatcaacgatataaattcagtagatggaaattatattggccaagttttagttacagctgatgactatggaattataaaattattccgatatccatgtttaagaaaaggggccaagtttagaaaatatattggccattcagctcacgtaactaatgtcagatggtcacatgattatcagtgggttatttctattggtggagcagatcactctgtctttcagtggaaatttattcctgaaagaaaactgaaagatgctgttcacatagcaccccaagaaagtctggctgactctcatagtgatgaatcagattcagatctgtctgatgttccagaactggattctgaaattgaacaagagacacagctcacctaccgtcgacaggtttacaaagaagatctacctcagcttaaagaacagtgcaaagagaaacaaaaaagtgctacttctaaaagaagagagcgggctccaggaaatagtattcgattacactttgttcacggttacagaggttatgactgtcgaagtaatctgttttatactcaaattggtgaaattgtgtaccatgtggcagcagtgggtgtcatttataatcgacagcaaaacacacagcgtttttatctgggtcatgatgatgatattctctgcctaactattcatcctttgaaagactacgtggcaacaggccaggttggtagagatccctcaattcatatatgggatacagagaccattaaaccattgtccatattaaagggccaccaccagtatggtgttagtgccgttgatttctcagcggatgggaaacgtttggcatcagttggcatagatgatagccatactgttgtgctctgggactggaagaaaggagagaaactttcaatagcaagaggaagtaaagataagatttttgttgtaaagatgaacccctatgtgcctgataaactaattacagctggaattaaacacatgaaattttggcgtaaagcagggggaggattgattggaagaaaaggctacataggcacactggggaaaaatgacacaatgatgtgtgcagtgtatggatggactgaagagatggctttttctggaacatccacaggagatgtgtgtatctggagagacatctttcttgtaaaaacagtgaaagcgcatgatgggccagtgttcagtatgcatgcattggaaaaagggtttgtaactggaggaaaagatggtatagtagctctttgggatgactcttttgaaagatgtctcaagacctatgctataaaaagagctgcattggccccaggatctaaaggtcttctcttggaagataatccatctatacgtgccatatcattaggacatggtcatattttagttggcacaaagaatggtgaaatactagaagtggataaaagtggcccaataacacttctggttcagggacacatggaaggagaggtgtggggtttagctacacacccttatctgcccatctgtgctactgtaagcgatgataaaaccttaagaatatgggatctctcacctagtcattgtatgttggctgtccggaagctgaaaaagggtgggaggtgttgctgtttttctcctgatggtaaagctttagccgtaggtctcaacgatggaagcttcttaatggcaaatgcggatactctagaggatcttgtgtcttttcatcacagaaaagatatgatttcagatattcgattttcacctggttctgggaaatatcttgctgtagcatcccatgacagctttatagatatatacaatgtaatgagtagtaaacgagtaggaatatgcaaaggagctaccagttacataacccatattgattgggatattagaggaaagcttttacaggtcaacactggtgctaaggaacaattattctttgaagctcccagagggaaaaaacaaaccatccccagcgtggaggtagaaaaaattgcttgggcatcatggacaagtgtacttggtttatgctgtgaaggaatttggccagtaattggagaagttacagatgtaactgcttcttgcctcaccagtgacaaaatggttctagctaccggggacgatttgggatttgtgaagttatttagatatcctactaaagggaaatttggaaagtttaagaggtatgtggcccatagtacacatgtcacaaatgttcgctggacttatgatgacagcatgttggttaccctaggcggtacagatatgtctttaatggtgtggacaaatgagatggaaggctatcgagaaaaaaggccttgtgatagtgaagaatccgacattgattctgaagaagatgggggctatgacagtgatgttacaagggagaatgaaatcagttacaccatcagagccttatcaacaaatattcgcccaatgttaggaatcaagcctcatttacaacaaaaagaaccctcaattgatgaaaggcagggagtagtaagaggttccaggcctccagtgagcagggccccaccacagccagagaaactccagacaaacaatgtaggcaagaaaaagagacctatagaggaccttgtgttggagctcatttttggttatcgaggcagagactgtaggaataatgttcactatttaaatgatggtgatgatataatttatcacactgcatctgttggaattctgcacaatgttgctacaggttctcagagtttttatcaggaacataatgatgatattctgtgcctcacagtaaaccagcaccccaaatttatcaacatagtggcaactggccaagtaggtgattcagcagacatgtcagctacagctccttctattcacatctgggatgcaatgaacaagcagactttatctatcctaagatgctaccattcaaagggagtatgttcagtcagcttcagtgctactggcaaactattgctgtctgtgggactagacccagaacatactattaccatttggagatggcaggaaggtgccaaaattgccagcagagctggtcacaatcaacgtatttttgtggcagaattccgaccagattcagatacccagtttgtctcagtgggagtaaaacatgtgaagttctggaccctggcaggaagagctcttcttagcaaaaaagggctactgagcacactggaagatgcccggatgcagaccatgctcgctattgcatttggtgcaaataacttgacgtttacaggtaccatcagtggtgatgtctgtgtgtggaaagatcacatattgtgtagaatcgtggcgagagctcacaacgggcctgtgtttgccatgtacaccaccctgcgagatggacttatcgtgactgggggaaaggaaaggccgtcaaaagaaggaggagcggttaaactgtgggatcaggaactgaggcggtgccgtgccttcaggcttgagacaggacaagccacagattgtgttcgttctgtgtgcagaggcaaaggcaagatccttgttgggacaaggaatgctgaaataatcgaagttggagagaaaaatgcagcttgtaatattttagttaacggtcatgtggatgggccaatctggggactagcaacacatccttccagggattttttcctttctgctgcagaagatgggacagtgagactttgggatattgctgataaaaagatgttaaacaaagtgaatttgggacatgctgctcgtactgtgtgttacagccctgaaggggacatggtggctattggaatgaaaaatggagaatttatcattttactagtgagttctctaaaaatatggggaaagaagagagacaggagatgtgcaatccatgatatcagatttagtccggattcccggtatctggcagtaggttctagtgagaactcagtggatttttatgacctaacgctgggccccactcttaacagaatcagctactgcaaagacattccaagctttgtcattcaaatggacttctctgcagatagcagttatctccaggtctctagtggctgctataaacggcatgtctatgaagtgccttcaggaaaacatcttatggatcatgccgctattgacagaattacttgggctacatggactagtattctaggagatgaggttttgggaatctggtccagacatgctgagaaagctgatgtcaactgtgcctgtgtatctcattcaggaatcagtcttgttacaggagatgactttggcatggttaagttatttgacttcccatgtccagaaaaatttgcaaaacacaaaaggttcttgggtcattcgccccatgtgacaaatattcgatttaccagtggtgatcgacatgttgttagtgctggaggtgatgactgcagcttatttgtctggaaatgtgtacatacacctcactgagagatgctgagatgactacagaaattaactttgagaccagaattacagagaagaaaaaccaaaacccaaccctgcatggtcaagtggtgctaacccaagactgtaacagggagaaatgcccagaatcatcaaaatagtgaaagactgatctgttcaaaatatttgctatatgcactgggtataatccgtaatccatacactgccagataatgccatttcaaggaaggatcgaatacttgatggtaaaggccaagtccccctgtattgggaagtgtgtgatttcggcagacctgctgggaaaatttagggtagagcactctttacagaagaactcaaaaacccaatttggataattttcattatctttttagcaaaatggtttcttaatgtttatattttattttcaaggttcattgtttaatgaaatattttattcttgcatttccataaggaaagggaaagtcatgatcatcctaaaggatcacagtttttaaaaggcaaacattttccctaaggaaacagacacaagctttcctagagaatatgatgttttttaggcattaataaggtccttttttataaaggacacttttctcctagtagttttgaattcaggaacagatccaaagttagcagtatatggctgctacatttccattttcattttcgagccatcagtttatgttcagatgccatctctgtaatcgcacatttaaaacataactgtagcctcactaatggaaaagtagtatgatgaacaatcattcccaatggtgtacaatgtaagggttttagggagcaacagtatttaactggaagaaagaattgcatatttaatgtagtctaatatatacacatttgtttaacatgtaaacaaaagtgttaaattcacatatacaacattatacaatttaatcactcttggaataaaatttttatagccttttttctattgggaaaatttgtttagatgtgtgccactccatag

SEQ ID NO: 80 - DNA, 2005 bp, Homo sapiens
cagagagccagctgcggagaagacccaaggagccctatgtcttcccccaaccctgaggatgtgccccggaggccagaacctgagccctcaagctccaataagaaaaagaagaaaagaaagtggctgcggcaagaagccagcatccaagccctcaccagggctggccatggggcccttcaggctggccagaaccatgaagccttgaacaacttccagagggccttccttctggcctccaaggccccacaaaccagggatacccctgtgctccaggcctgcgccttcaacctgggggctgcctatgtggagactggggacccagccagaggccttgagctactcctgcgagcccaccctgaagagaaggcacagggcaggcgacacggcgaccaatgtttcaatgtggctttggcctaccatgccctcggcgagctgcctcaagctttggcctggtaccacagggccctgggccactaccagccacagggtgaccagggagaagcctgggcaaaaatgggagcctgctaccaggctctgggacagcctgagctagcagcccactgcctgcaggaagcaagccaggcctatgctcaagagagacagctgcgggccgcagccctggcactgggggctgcggcaggatgtatgctgaagagtgggcggcatcgggtgggggaagttgtgcaggtgctggagaaaagccggaggcttgccgagaggagcactgagaggcgactgctggggcacctctataacgatctaggcctgggctactcccagctccagctgttcccgctggccgtggaggccttcctgcaggccctgcccctgtgctgggtgccaggagagcaggccacagtgctaagaaacctcgggatggcccacaatgccctcggcaactatcaggaagctcgggagtttcaccagaaggctgctgacctacacggctctgtggggcagcggtgggagcagggccggagctttggcagcctggcctttgcattgagccagctgggggaccacaaggctgccagagacaactacctgcatgccctgcaggctgcccgggactctggggacatgaagggacagtggcaggcctgtgagggtctgggggctgctgcagccaggctggggcagtatgaccaggccttgaagtactataaggaagcactggcccagtgtcagaaggagccagattctgtgcgagaacggctggtggccaagctggcagacaccgtgaggacgcgcttggcccaggtggggctggtccagactcacaccctgacttcggctccgggaagactccaggctccaggtggggccagccaggcggaggggaccccagcaaaggcaggaagcagcacagcaggtgtccagcacagatcttccagtgggtgggaagatgaagagtttgaggagggccaccagaagaaaaaagaggagaggtcggcaaacgttccggtgagggctgggccgggaagaccagagctgtgtttccttccaggcacagtgaatcattcgcaccatctagcttctagttgccccacgtttaccaagcacacgccctgcagagggacagtcctcggcaaagcctccatctatagtccaggacccagggcccatcttccatttgtaggtccaggccctcccagagcggagtaccctagcatcttggtacccaatggccctcaagccaataggtcatccaggtggcccagggaaagcctcagcaggagccgccagaggagacccatggagtcgggcatctgcactattgtgtgacctccccctgccagcctcagccctcatccctgaagcacctgtccaacacgcacacactagggggtcctggggaccaagcctcttcccagttgctcagccctgcagggatgtggaacacagtgcagccagtggactcctgaggaggctggccaagggctttgcaggctcggccctgagaggttctgtttgttcctccttgggatttttggactcagtaggt

SEQ ID NO: 81 - DNA, 10906 bp, Homo sapiens
attggtggaggcggcaagtttaaacagagtcaaaacgccatacttgtttggctcctctttttaatttgcgagtttattgggcttgttttctgttttctagggagtaggttagtggaaaagaaaaagggccgaattcactcccacgacctctacagccgcccctgaggggaagcggtcagcgtaagtcccggatccccgctccggagccgcctcgtgggagcggggcaaggagatccaggaggggtctcgaatctgccatggcgaaccggcgagtggggcgaggctgctgggaagtgagcccgaccgagcggaggccgcccgcggggctgcggggccccgcggccgaggaggaggcgtcttccccgccggtcctgtctctcagccacttctgcaggtctcctttcctttgcttcggggacgttctcctgggagcctcacggacgctgtctctggccctagacaaccctaacgaggaggtggcagaagtgaagatctcccacttcccggccgcggacctgggcttcagtgtgtcgcagcgctgtttcgtgttgcagcctaaagagaaaattgttatttctgttaactggacaccactcaaagaaggccgagtaagagagattatgacatttcttgtaaatgatgttctgaaacaccaagctatattactaggaaatgcagaagagcagaaaaagaaaaagaggagtctttgggataccattaaaaagaagaaaatttcagcctctacaagtcacaacagaagggtttcaaatattcagaatgttaataaaacatttagtgtttcccaaaaagttgacagagttaggagcccactacaagcttgtgaaaacttggctatgaatgaaggcggtcccccaacagaaaacaattctttaatacttgaagaaaataaaatacccatatcacctattagccctgctttcaatgaatgccatggtgcaacttgcttgccactctctgtacgtcgatctactacctactcatctcttcatgcatcagaaaatagggaactattaaatgtacacagtgccaacgtttcaaaagtttcttttaatgagaaagctgtaactgaaacttcctttaattccgtaaatgttaatggccaaagaggagagaatagtaaacttagtcttacccccaactgttcttcaactttgaacattacacaaagccaaatacattttctaagtccagattcttttgtaaataatagtcatggagctaataatgaactagaattagtaacatgtctttcatcagatatgtttatgaaagataattcacagcctgtgcatttggaatcaacaattgcacatgaaatttatcagaaaattttaagtccagattctttcataaaagataattatggactaaatcaggatctagaatcagagtcagttaatcctattttatcccctaatcaatttttaaaagataacatggcatatatgtgtacatctcagcaaacatgtaaagtaccattatcaaatgaaaattctcaagtcccacagtctcctgaagattggagaaaaagtgaagtttcgccacgtattcctgaatgtcagggttcaaaatctcccaaagctatttttgaagaactagtagaaatgaagtcaaattactacagttttataaaacaaaataatcctaaattttctgcagttcaggatatttctagtcatagccacaataaacaacctaagagacgtccaatactttctgccactgttactaaaaggaaggccacctgtaccagagaaaaccaaactgagattaataaaccaaaagcaaaaagatgtctcaacagtgcagtgggtgaacatgaaaaagtaataaataatcaaaaggaaaaagaagattttcattcttatcttccaattatagatccaatattaagtaaatctaagagttataaaaacgaggtaacaccctcttcgacaacagcttcagttgctcggaaaagaaagagcgatggaagcatggaagatgcaaatgtgagagttgcaattacagaacatacagaagtgcgagaaatcaaaagaatccatttttctccctcagagcctaaaacatcagctgttaagaaaacaaaaaatgtgacaacacccatctcaaaacgtattagcaacagagagaaattaaacctgaagaagaaaactgatttatcaatattcagaactccaatttctaaaacaaacaaaaggacaaaacccattatcgctgtggcacagtccagtttgaccttcataaaaccattaaaaacagatattcccagacacccgatgccatttgctgcaaaaaacatgttttatgatgaacgctggaaggaaaagcaggaacagggcttcacttggtggttaaattttatattaacccctgatgacttcactgtaaaaacaaatatttctgaagtaaatgctgctactcttcttttgggaatagagaatcaacataaaataagtgttcctagagcacctacaaaagaggaaatgtctctcagagcttatactgctcggtgtaggttaaacagactacgtcgtgcagcatgccgtttgtttacttctgaaaaaatggttaaagctattaaaaagcttgaaattgaaattgaagctaggcggttaattgttcgaaaagatagacacctatggaaagatgtgggagaacgtcagaaagtcctgaattggctgttgtcctacaatcctttgtggcttcgaattggtctagagacaacttatggagaactcatatctttggaagataacagtgatgtcacagggttggctatgtttattctgaatcgcctactttggaatcctgatatagcagctgagtatagacaccccactgttcctcacctgtatagagatggtcatgaagaagctttgtccaagtttacattgaaaaagttattgttgttggtctgttttcttgattatgctaaaatttccagactcattgatcatgatccttgtctcttctgtaaagatgccgaattcaaggctagtaaagaaatccttttggctttttcacgagatttcctaagtggtgaaggtgacctttcccgtcaccttggcttattgggattacctgttaaccatgttcagacaccatttgatgaatttgattttgccgttacaaatcttgccgtagacttgcaatgtggagtgcgccttgtgcgaaccatggaacttctcacacagaactgggacctctcaaagaaactcaggattccggcaataagtcgtcttcaaaagatgcacaatgttgacattgttcttcaagttcttaaatcacgaggaattgaattaagtgatgagcatggaaatacaattctatctaaggatattgtggataggcacagagaaaaaactctcaggttgctttggaaaatagcgtttgcttttcaggtggatatttcccttaacttagatcaattaaaggaagaaattgcctttctaaaacacacaaagagtataaagaaaacaatatctctactatcatgccattctgatgatcttattaataagaaaaaaggcaaaagggatagtggttcctttgaacaatatagtgaaaacataaagttattgatggattgggtaaatgctgtttgtgccttctataataaaaaggtggagaattttacagtgtctttctcagacggccgtgtgttatgttacctgatccaccattaccatccttgctatgtgccatttgacgctatatgtcagcgtactactcaaactgtggaatgtacgcaaactggttcagtggtattaaattcatcatctgaatctgatgacagttctctggatatgtctcttaaagcatttgatcatgaaaatacttcagagctatacaaagagctcctagaaaatgaaaagaaaaattttcacttggttaggtctgcagttagagaccttggtggaatacctgctatgattaatcattcagatatgtcaaatacaattccagatgaaaaggtggttattacctatttgtcatttctttgtgcaaggcttttggatcttcgtaaagaaataagagctgctcgactcatacaaacaacatggagaaaatataaactaaaaacagatctcaaacgccatcaggagagagagaaagctgcaagaattattcaattggctgtaatcaattttctagcaaaacaaagattgagaaaaagagttaatgcagcactcgtcattcagaaatattggcgaagagtcttagcacagagaaaattattaatgttaaaaaaggaaaagctggaaaaagttcaaaataaagcagcatcacttattcagggatattggagaagatattccactagacaaagatttctgaaattgaaatattattcaatcatcctgcaatctaggataagaatgataattgctgttacatcttataaacgatatctttgggctacagttacaattcagaggcattggcgtgcttatttaagaagaaaacaagatcaacaaagatatgaaatgctaaaatcatcaactcttataatccaatctatgttcagaaaatggaagcaacgtaaaatgcaatcacaagtaaaagctacagtaatattgcaaagagcttttagagaatggcatttaagaaaacaagctaaagaagaaaattctgctattatcatacaatcatggtatagaatgcataaagaattacggaaatatatttatattagatcttgtgttgttatcattcagaaaagatttcggtgctttcaagcccaaaagttatataaaagaagaaaagagtccatactaaccatccagaagtactacaaagcatatctgaaaggaaagattgagcgcaccaactatttgcagaaacgagctgcagccattcaattacaagctgcttttaggagactgaaagctcataatttatgtagacaaattagagctgcttgtgttattcagtcatactggagaatgagacaagacagagttcgatttttaaaccttaagaagactattatcaaatttcaggcacatgtaagaaaacatcaacaacgacagaaatataagaagatgaagaaagcagctgttataattcagactcatttccgagcttatatttttgccatgaaagttctagcatcttaccagaaaacacgctctgctgtcattgtgctgcagtctgcatatagagggatgcaagccaggaaaatgtatattcacatcctcacatctgttataaagattcaatcatattatcgtgcttatgtttctaaaaaggaatttttgagcctaaaaaatgctacaataaaattgcagtcaactgttaagatgaaacaaacacgtaaacaatatttgcatttaagagcagctgcactatttatccagcaatgttaccgttccaaaaaaatagctgcacaaaagagagaagagtatatgcagatgcgggaatcttgtatcaaactgcaagcatttgttagaggataccttgtccgaaagcagatgaggttacaaagaaaagctgttatttcactacagtcttatttcagaatgagaaaggctcggcagtattatctgaaaatgtataaagcaattattgtcattcagaattactatcatgcatacaaagcacaggtcaatcagaggaagaacttcttgcaagtcaaaaaagcagctacttgcttgcaagcagcttacagaggttataaagtacgccagctaatcaaacaacaatctatagctgctcttaaaattcagtctgcttttagaggctataataaaagggtaaaatatcaatctgtgcttcaatctataataaagattcagagatggtacagggcgtacaagactcttcatgatacaagaacacattttttgaagacaaaggcagctgtgatttccctccagtctgcttatcgtggctggaaggttcggaaacagattagaagggaacatcaagctgccttgaagattcagtctgcttttagaatggccaaggcccagaaacagtttagattgtttaaaacagcagcattagtcatccagcaaaatttcagagcatggactgcaggaaggaagcaatgtatggagtatattgaactccgtcatgcggtactggtgcttcaatctatgtggaagggaaaaacactgagaagacagcttcaaaggcaacataaatgtgctatcatcatacagtcatactatagaatgcatgtgcaacaaaagaagtggaaaatcatgaaaaaagctgctcttctgattcaaaagtattatagggcttacagtattggaagagaacagaatcatttatatttgaaaacaaaagcagctgtagtaactttacagtcagcttatcgtggtatgaaagtgagaaaaagaataaaggattgcaacaaagcagcagtcactatacagtctaaatacagagcttacaaaaccaaaaagaaatatgcaacctatagagcttcagctattataattcagagatggtatcgaggtattaaaattacaaaccatcagcataaggagtatcttaatttgaagaagacagcaattaaaatccaatctgtttatagaggtattagagttagaagacatattcaacacatgcacagggcagccacttttattaaagccatgtttaaaatgcatcagtcaagaataagttaccatacaatgagaaaagcagctattgttattcaagtaagatgtagagcatattatcaaggtaaaatgcagcgtgaaaagtacctgacaattttgaaagctgttaaagtccttcaggcaagttttagaggagtaagagttagacggactcttagaaagatgcagactgcagcaacactcattcagtcaaactacagaagatacagacagcaaacatactttaataagttaaagaaaataacaaaaacagtacagcaaagatactgggcaatgaaagaaagaaacatacaatttcaaaggtataacaaactgaggcattctgtaatatacattcaggctatttttaggggaaagaaagctagaagacatttaaaaatgatgcatatagccgcaactctcattcagaggagatttagaactctaatgatgagaagaagattcctctctctcaagaaaactgctattttgattcagagaaaatatcgggcacatctttgtacaaagcatcacttacagttccttcaggtacaaaatgcagttattaaaatccagtcatcatacagaagatggatgataaggaaaaggatgcgagagatgcacagggctgctactttcatccagtctactttcagaatgcacagattacatatgagatatcaggctttgaaacaggcctccgttgtgatccaacagcaataccaagcaaatagagctgcaaaactgcagaggcagcattatctcagacaaagacactctgctgtgatccttcaggctgcattcaggggtatgaaaactagaagacatttgaagagtatgcattcctctgcaacccttattcagagtaggtttagatcattactggtgaggagaagattcatttccctcaaaaaagctactatttttgttcagaggaaatatcgagccaccatttgtgccaaacataaattgtaccaattcttgcacttaagaaaggcagccattacaatacagtcatcttacagaagactgatggtaaagaagaagttacaagaaatgcaaagggctgcagttctcattcaggctactttcaggatgtacagaacatatattacatttcagacttggaaacatgcttcaattctaattcagcaacattatcgaacatatagagctgcaaaattacaaagagaaaattatatcagacaatggcattctgctgtggttattcaggctgcatataaaggaatgaaagcaagacaacttttaagggaaaaacacaaagcttctatcgtaatacaaagcacctacagaatgtataggcagtattgtttctaccaaaagcttcagtgggctacaaaaatcatacaagaaaaatatagagcaaataaaaagaaacagaaagtatttcaacacaatgaacttaagaaagagacttgtgttcaggcaggttttcaggacatgaacataaaaaaacagattcaggaacagcaccaggctgccattattattcagaagcattgtaaagcctttaaaataaggaagcattatctccaccttagagcaacagtagtttctattcaaagaagatacagaaaactaactgcagtgcgtacccaagcagttatttgtatacagtcttattacagaggctttaaagtacgaaaggatattcaaaatatgcaccgggctgccacactaattcagtcattctatcgaatgcacagggccaaagttgattatgaaacaaagaaaactgcaattgtggttatacagaattattataggttgtatgttagagtaaaaacagaaagaaaaaactttttagcagttcagaaatctgtacgaactattcaggctgcttttagaggcatgaaagttagacaaaaattgaaaaatgtatcagaggaaaagatggcagccattgttaaccaatctgcactctgctgttacagaagtaaaactcagtatgaagctgttcaaagtgaaggtgttatgattcaagagtggtataaagcttctggccttgcttgttcacaggaagcagagtatcattctcaaagtagggctgcagtaacaattcaaaaagctttttgtagaatggtcacaagaaaactggaaacacagaaatgtgctgccctacggattcagttcttccttcagatggctgtgtatcggagaagatttgttcagcagaaaagagctgctatcactttacagcattattttaggacgtggcaaaccagaaaacagtttttactatatagaaaagcagcagtggttttacaaaatcactacagagcatttctgtctgcaaaacatcaaagacaagtctatttacagatcagaagcagtgttatcattattcaagctagaagtaaaggatttatacagaaacggaagtttcaggaaattaaaaatagcaccataaaaattcaggctatgtggaggagatatagagccaagaaatatttatgtaaagtgaaagctgcctgcaagattcaagcctggtatagatgttggagagcacacaaagaatatctagctatattaaaagctgttaaaattattcaaggttgcttctataccaaactagagagaacacggtttttgaatgtgagagcatcagcaattatcattcagagaaaatggagagctatacttcctgcaaagatagctcatgaacacttcttaatgataaaaagacatcgagctgcttgtttgatccaagcacattatagaggatataaaggaaggcaggtctttcttcggcagaaatctgctgctttgatcatacaaaaatatatacgagccagggaggctggaaagcatgaaaggataaaatatattgaatttaaaaaatctacagttatcctacaagcactggtgcgtggttggctagtacgaaaaagatttttagaacagagagccaaaattcgacttcttcacttcactgcagctgcatattatcacctgaatgctgttagaattcaaagagcctataaactttacctggctgtgaagaatgctaacaagcaggttaattcagtcatctgtattcagagatggtttcgagcaagattacaagaaaagagatttattcagaaatatcatagcatcaaaaagattgagcatgaaggtcaagaatgtctgagccagcgaaatagggctgcatcagtaatacagaaagcagtgcgccattttctcctccgtaaaaagcaggaaaaattcactagtggaatcattaaaattcaggcattatggagaggctattcttggaggaagaaaaatgattgtacaaaaattaaagctatacgactaagtcttcaagttgttaatagggagattcgagaagaaaacaaactctacaaaagaactgcacttgcacttcattaccttttgacatataagcacctttctgccattcttgaggccttaaaacacctagaggtagttactagattgtctccactttgttgtgagaacatggcccagagtggagcaatttctaaaatatttgttttgatccgaagttgtaatcgcagtattccttgtatggaagtcatcagatatgctgtgcaagtcttgcttaatgtatctaagtatgagaaaactacttcagcagtttatgatgtagaaaattgtatagatatactattggagcttttgcagatataccgagaaaagcctggtaataaagttgcagacaaaggcggaagcatttttacaaaaacttgttgtttgttggctattttactgaagacaacaaatagagcctctgatgtacgaagtaggtccaaagttgttgaccgtatttacagtctctacaaacttacagctcataaacataaaatgaatactgaaagaatactttacaagcaaaagaagaattcttctataagcattccttttatcccagaaacacctgtaaggaccagaatagtttcaagacttaagccagattgggttttgagaagagataacatggaagaaatcacaaatcccctgcaagctattcaaatggtgatggatacgcttggcattccttattagtaaatgtaaacattttcagtatgtatagtgtaaagaaatattaaagccaatcatgagtacgtaaagtgatttttgctctccgtgtacaacttttaaaatctgactttgttttaaaaaaacataaactgttcattacattcttcatttttatcatttatagttttatgcatgtaataaactaatatgtcataagatgaaaaaaaaaaaaaaaaaaa

SEQ ID NO: 82 - DNA, 4713 bp, Homo sapiens
gggcctccagtgcaatcactacgccctggggcccggaaaccgttttccggtctttcgctttcggctggggcgtggaggccgcggtgctgcgtaggccgggccgggcgcaggaacagccccgtggcgccctctctggccgccgcccgggcgggaaacgtcgttccggggaccgggcgaccccgcagcggggagcgcgccaggtccgcgcggggaagtgggcggtgtgcggccggcaccgcctcgcaccacgcccccgcgggcccgcactttcccggagtgcaccccgcggccgccagccggggcgatggcggggctctggctggggctcgtgtggcagaagctgctgctgtggggcgcggcgagtgccctttccctggccggcgccagtctggtcctgagcctgctgcagagggtggcgagctacgcgcggaaatggcagcagatgcggcccatccccacggtggcccgcgcctacccactggtgggccacgcgctgctgatgaagccggacgggcgagaattttttcagcagatcattgagtacacagaggaataccgccacatgccgctgctgaagctctgggtcgggccagtgcccatggtggccctttataatgcagaaaatgtggaggtaattttaactagttcaaagcaaattgacaaatcctctatgtacaagtttttagaaccatggcttggcctaggacttcttacaagtactggaaacaaatggcgctccaggagaaagatgttaacacccactttccattttaccattctggaagatttcttagatatcatgaatgaacaagcaaatatattggttaagaaacttgaaaaacacattaaccaagaagcatttaactgctttttttacatcactctttgtgccttagatatcatctgtgaaacagctatggggaagaatattggtgctcaaagtaatgatgattccgagtatgtccgtgcagtttatagaatgagtgagatgatatttcgaagaataaagatgccctggctttggcttgatctctggtaccttatgtttaaagaaggatgggaacacaaaaagagccttcagatcctacatacttttaccaacagtgtcatcgctgaacgggccaatgaaatgaacgccaatgaagactgtagaggtgatggcaggggctctgccccctccaaaaataaacgcagggcctttcttgacttgcttttaagtgtgactgatgacgaagggaacaggctaagtcatgaagatattcgagaagaagttgacaccttcatgtttgaggggcacgatacaactgcagctgcaataaactggtccttatacctgttgggttctaacccagaagtccagaaaaaagtggatcatgaattggatgacgtgtttgggaagtctgaccgtcccgctacagtagaagacctgaagaaacttcggtatctggaatgtgttattaaggagacccttcgcctttttccttctgttcctttatttgcccgtagtgttagtgaagattgtgaagtggcaggttacagagttctaaaaggcactgaagccgtcatcattccctatgcattgcacagagatccgagatacttccccaaccccgaggagttccagcctgagcggttcttccccgagaatgcacaagggcgccatccatatgcctacgtgcccttctctgctggccccaggaactgtataggtcaaaagtttgctgtgatggaagaaaagaccattctttcgtgcatcctgaggcacttttggatagaatccaaccagaaaagagaagagcttggtctagaaggacagttgattcttcgtccaagtaatggcatctggatcaagttgaagaggagaaatgcagatgaacgctaactatattattgggttgtgcctttatcatgagaaaggtctttattttaagagatccttgtcatttacaatttacagatcatgagttcaatatgcttgaatcccctagacctaatttttccttgatcccactgatcttgacatcaagtctaacaaagaaaaagttttgagttttgtattttcttttttcttttttctttattttttttttttgaaaccgtgtctcactctgtcgcccaggctggaggagtgcagtggtgtgatctcagctcactgcaacctccacctcccaggttcaagcaattcttctgcctcagcctcccaagtagctgggattacaggtgcctgccaccatgcctggctaatttttttgtatttttagtagaaacagggtgtcaccatgttggccagactggtctcaaactcctgacctcaagtgatccacctgcctcagcctcccaaagtgctgggattatagtcgtgagccaccacgcctggccagagttttttatttttatcaccaccatagatgttacagttggctgtggtcacaaaagtagttaattgtgtcagcacccaaataaacatctaacaggtttctcaacagaggaatccacagtccaattccacttcaattgatagacccaaaaaatataatttaatcaaagttctagagtttttgtttgtttgtttgagatggagtcttgctctgtcgcccaggctggaacgcagtggtgacatctcggctcactgcaacctccacctcccaggttcaagtgattctcctgcctcagcctcctgagtagctgggactacaggcgcctgccaccacgcccagctaatttttgtatttttagtagagatggggtttcaccatgttggccaggatggtcttgatctcttgacctcgtgatctgcctgcctcggcctcccaaagtgctggcattacaggcatgagccaccatgcctggcccaaagttctagaattttttaaaggtattcatggtgactcaggaatacacacatacacacacacacacacacacacacacacacacatacacacatataatttgaaagaggtgagtatgtactctgacttcagctctcaggttttaaaaattatattagtgggaccagttatgacaagaataatcattatagtacttttcagattttataacctggagcagattattttaagttgattagtaggttctgttacagtttttcttttgatcgtgcacttatagtcttcatttaattcctcatagaatcccagtcacctttatatatcatattattggaagagattcatcttcataatctccagttttttcacagtgcctcacagagttaatcatgccttttggagctagaaggactttagaacttatctagttatgctcctttatattataagtaagggaatagaatcaataagacagtttctgcccaaagtcatgttaccagttggtgacagagctggaaatacgtagagatctatacccttaaatctctccactcacatgctgatatactttctactacaatatgctatagctttatggaactcagggtgatgatcagacgtgtcattagaacatgagtcctctgcttctgattcaggcatacttttgggattcttccatctttaaaggaaaaaggaagccattcatctatatttagtaacccagtaatatctcacttagtttagggttagatctttagttaattcaaccttatagatcatacttatgaaggtgataactgacacgtgttcactgaattttaatttgataggcaatacatctacccactccattattttttaaaacttcatttaatagtttaaacaagattggttttgttttcaatttttattcactcttcatagaatcacaattacctttatatatcatatgttattggaagagattcctcagtaatctccaatctctcatagtgcctcacagggttggtcaatggcttttggaactggaaggaccttagaacttatctgttatgctcctgatagccaatagcagatagaagcttgcaatcaagagggtaggacatgtgttcttcaatggatatcaaaggaagaggttgcaaaccaaagccatttggcaagccctgtagcctgggccatttaagacaggggcggtctcagccaaattgcacccatttaactatcccaaagagccacagtgcctacaacccaggccctaagttgatgaagaaaaagtcaaggaaggaggtgatacaattggaaatattcccatcaaatggttaatcttatttagaaaatgggcatattagaaaaagtccttccaagatgattttggataataaaagttgtatttgtggaaattggtattatctctgttttatgcacttacatttatcccttacattttgtttttagtgaccctacatgacattaaatttaaagtaaaacattgtttaatgttaccttttggcttgagaatgtctttcagctccagaattattgttactcatattttaatcagtaagtcatttaagctatgacagagtaggaattgagaaattatttcatatgctacagtattgaaatgtggatgctgccttgttttataagaagatgatcaaggtttgtgtgcccattacctttcctctgcctgaaagacgtgtctcaagaaaaataaattctattttagatgcaggtactgcattttattctaagaattgatatcaattcaaaacatagaaaactgtaaaagataaatcaggagatggctgattcataatgggtaataaaataaatagcactttcgagctgaaaaaaaaaa

SEQ ID NO: 83 - DNA, 4685 bp, Homo sapiens
agtctccttgtgcgatctcccagacatgagagccctgctgggctttctggctcctcctccgtgcagagttgtcccgtcaggagccaggaggggcgacgctggctccgtgggagggtgaacagtggctcaagatgagaagcgtattgagacaaagaattctgaaaccgaaagatgtggccatttattctggagaagtcaaccaagttattgctgacttaattaaaagaatctacctcctcaggagccaggcagaagatggagaaaccgtgaccaatgtcaatgatcttttcttcaaatattcaatggaaggagtggccaccatcctttatgagagtcgtttgggctgcctggaaaacagcatcccacagctgactgtggaatacatcgaggccctggagctcatgtttagcatgttcaagacctccatgtatgcaggcgccatccccagatggcttcgccccttcatcccaaagccctggcgggaattctgcaggtcctgggatggactcttcaaattcagccaaattcatgttgacaacaagttgagggacatacagtaccaaatggaccgaggccggagggtgagcgggggacttctcacatacctcttccttagccaggctctgacgctgcaggagatctacgccaacgtgactgagatgctgctggccggcgtcgacacgacgtccttcaccttgtcttggactgtgtacctcctggcaaggcacccagaagtgcagcagacggtgtaccgggagattgtgaagaatttaggggaaaggcatgttccaactgcagctgatgtccccaaggtcccgctggtcagagctctccttaaggaaaccctgaggctgtttccagtgctgccagggaacggccgggtcacccaggaagacctggttattggcgggtatctgattccgaaaggcacccagctggccctttgccactatgccacatcgtaccaggatgagaacttccctcgggccaaggagttccggcctgagcgctggctgcggaaaggagacttagatagagttgacaattttggatccatcccctttggtcatggggttcgcagctgcatagggcggagaattgcagaactggagattcacctcgtcgtgatccagttgcttcaacattttgagatcaaaacatcttctcagaccaatgctgttcatgcaaaaacccacgggctcctgacgccaggggggcccatccacgtgcgatttgttaacagaaagtaagcctagattttaaacctgggctgatgtagcagaccagctcgccgacacacagtgggtatttgtgttcgctgatcaccgtggagaaggaaagcgatgtcgctaaaggctgtcttgttatagactggcctcccaggtcctgggacacttgtaaatctttatgcaaagtaatgtaaaaaggttgctattttactggtgcataccagaagttgccctttctttgggggaaacagctgtttaaaaaccagtggcagtgaatttttatgcttcatacattgtgctagactcaatatttaatgactggcagtatcctgtgcatttacttgtacagggaaatggtggtttacttacaaattcagttcttcaatatatgttctctaatactggcatctgggctcaaattgccatcaacagtaagttgaaggcaatttcaacttactgtttctaatttgaagagggaacattaagaatgcctctgtaatactgtaattatgggaagaaagcaccagaggcaacattttatcctgagcaccagatttagatcctgttaaagggctcaaacttaaaagggctggccgggtgcggtggctcacgcctgtaatcccagcactttgggaggtcaaggtgggaggattgcttgagccagaagttcgagaccagcctgagcaacatggtgaaaccctgtctctaccaaaaatacaaaaattagccgggcgtggtggtgcacacctatggtcctagttactcggaagactgaggcaggaggatcgtttgagctcaggaggttgggtctgcagtgagctatctatgatggcaccactgcacttcagcctgggtgacagagtgagaccctttctcaaaaataaaataaaataaaataaaataaaataaaataaaataaaatggctgtataagaatacttttctctccacaacgagtgcttaattttctagtcataatgcctaatgaagttgactattagtttttatttggaagaaataaataataaataaataataaataaataaaaaagaaagctcctggtgaaatcaagaataatcagattttctaaccaaatctaaatacagagtagagcagacgtataagaactggaaatatgatgacgtaaaattttgttgcctaagttgtgagaagtaataaaacaggcagcatggaaaacaatgtaactttagaacatttttatttcaagggaaaataaatacataaatagagatgctacagatacaacaatatttttatcttgatggtgttgttttaaatatccacacaagaaccctcacccagttgtgtgcctgtgccaggctctctgggaagccgtggctccgggagtgctgggtcctgaggagttctgttgcctttcctgctgctcaccggttgctaagaggaaacaccgtgatttcctgatgctcttgccttgtcatcatgcctgaaacagcttattcccaattctgtaattccttttacataatccttctccaaaaattactttcttactaatatagaccatacagttttttttccatttagtaagtcactctgcaaaataacccttaagtaaatagacataatatccatttcacataccatttttgttaaagtatataataaagttgaaatctctgtgtggtagcagaataactctagtatgaatgctgtaaatgtacaggtaaatgtgaaattaggtcatattaactggccaagtgttggattgattactttgaggtagcagtatacgtatattaagttttataaactagatgaaattgcattctgtttgagactgaaatttaaaaatattgagaataactaagcgacttgaagtgacctcttattccctgggtatacatacagtgtgaccctctcgtgaagtgtggctctgcctggggatcagcacagggtgaatagcaaagtgcgggctgggggtagcacctgtgcccgctgctgagtctcactgaacaggaagggaagcagccagacacgggggcctcctggtgtgatgtagcaggaagtgcagggcgccacccaggaagcatccacgccaaagaaatggagattcagctggacaagtttctaggttcgctactggtttataggaaatatgtggtatacagggagatgtcaaaactccatgggggctgggcgtggtggctcacacctgtaatttcagcactctggggaggttgaggcaggaggattgcttgaggccaggagtttgagacaagcttgggcaacacagtgagatcctgtctactaaaaatcaaaaaacttagctgagtgtggtggtgcatgcctgtagtcctagctatttgggaggctgaggctggaggattgcttaagtctgggaggttgaggctgcagtgagctgtgatccgccattacactccagcctgggtgacagagcaagacttcataacaaacaaacacacaaacaaactccatggggatgcagtcagcaaaatccagaatagagtgaggtctataggaccaatgtctcgggtttccaacaaaacaaatacgtgacaggcaaaaaacaagaggaggggccaggcgaggtggctcatgcctgtaatcccagcactttgggaggccaaggcgggcggataacctgaggtcaggggttccagaccagcctggccaacatggtgaaaccccatctctactaaaaatacagaaattatccaggcatggtggcgggcttctgtaattccagctacttgggaggctgaggcaggagaattgcttgaacctgggaggcagtttgcagtgagctgagatcacgccactgcactccacctgggcaacaagaacgaaactccgtatctaaaaaaaacaaaaaccaaaaagcaaaaaaaaaaccaaggggagaggagaactgttacagatgaagcaatataggagacatattaaccaagtacaatgctggacttcgtttgaatcagattcaaataaaccacttgtaaaaagacatttaagagataatttttaaaaataaaataaaagccaaaaatattaattcttccaatgcatgaaaaaaagagagcaactcggggaaatttgaatgctgactgtgtgtatttgatgatatttgggaattactgttaatttttttgttgtgataatggtagttatgttttaaaaaaagagactttatctcttggagatagctcttaaagatataaatgtttatggctgaaatgttatggcatcttggatttgctttaaaataacccagcttgctgcaggaggtgggtattgtgtgtgtgggaaggtggggaggctgcgggaggaagagatgacccaagattaggcagatgttgttaactgtggaagcagggtggtgagtgggggctcatgacattatgctctctactttgtgtacgtgtgaacatttccgtaataaaagatgccttcagaaac

SEQ ID NO: 84 - DNA, 7611 bp, Homo sapiens
gcaactacggagccgcagcccagggagcaagtctccgcaaacttgctccgcattcacggcaggacttcccagccgctgtggatgttcaggaaaaccgagtctgttctgttagcgtggcctttgaatgcttcaaaaataaacagaggataaccaaccgcgggaggaaatttttagctggagagagttgtagttcctgtgtctgtctccaggactgtgatatgtgttgactgaagagctaactacaagttcatcgtgaagaataaatgagataagctacctcaagtgcctgtaccaaaatagactcacaatacattgaccctggaaacagacgggggattcttataagtcacaaaagaaaataaataacttcatccatggagggaaagagacagcttgagaaaagggactttggaaaaaggctgtctctagacagcagtcttgtggaatacatggactccaataaatacattgagcatctgctgactcagcttgaggagcaacacaggagtctctggagggagaagttggcagtggcccgactacagcgagaagttgcccaaagaacaagtgagggggccatgcatgagaagctgatacatgaactggaagaggagagacacttacgtcttcaaagcgagaagcggttgcaggaggtgaccctagagtctgaacgcaacagaattcagatgcgtagcttgcagcagcagttctccaggatggaagaaacagtacgaaatctattgcagagtcaaggatctccagagcagaaaaaagaagaaactgttaatataatggtctatcaggaaaagctgtcagaggaagagagaaaacataaggaagctttggaagatcttcacatggtggttgatgaggattcgaggagtgaaagcagcagtacagatgagggaaaagaaaagaccaaattgctattagagagattgaaagctctagaggcagagaattcagcgttggctttggagaatgaaaatcaaagggaacaatatgagcgatgtcttgatgaggtagccaaccaagttgttcaagctctgcttactcaaaaggatctaagagaggaatgtgtgaagttgaaaacaagagtgtttgatttggaacagcagaatcgaacactaagcatcctattccaacagcgagtcagacccacttctgatctgctcctccagaaacttcactcacgtctcttggatctttcatctggagatttgctttcagaggtggaaagaaaccgaagtctgacacagtcacgaactgatgctgaggtgcacgaacaccaactaaatacaaaatcggccttgaaatgccctggcttgggggctgtcatccctggtcatctctgtcctcgaaacagctacagtagcagcagtgaactgtctctttcaagcacctgcagcgagtactccagtggctcctcctacacgtggcacgatgggaagaacctcaggaaaaggcaatcatcacaaaactgggataaaaggctaagtattgattcttcgctcccaagtggctttgctagtcctacaaatgaactacctccaactcgtatcaaggaaagccacattttggaagggctaagaaagctacagaagcgaaaagtgttacttgaacccccatcagtgataaccaaatggggttataaagattgcatgaactcgaatgaaggaatatattctcctggaattaaaagtagcagcctcaaggagtatcccccctgcaaaacagctgacctggggagcccctgcaaggaaccccacaagacatttgtttatgatctagattcccacgttgatgcggacgatgacccttccaccttagcattgctccaagcagttccaaaccagagctgcaggccacatggcagtaaattaacccacagtgtttccgacagtctgtttggctgggagacaaacagaaaacactttctggaaggcacatcctcagtttatcccaaggaaaggcctgaaaagctgacaagttgcgccagcagctgtcccttagagatgaagctgtgcccaagtgtgcagacgcctcaggtacagagggagaggggcccacagggccaaggccatggccgcatggctctcaacctccagctttcagacactgatgacaatgaaacgtttgatgagctgcacatagagagcagtgatgagaaaagtccttcagacgtgtcattggctgccgacaccgataagtccgtggagaacctggatgtccttgtggggtttggaaaatctctatgtgggtctcctgaagaggaggaaaaacaagtgcccatcccttcagagactaggccaaagacttttagtttcattaagcagcaaagagttgtaaaaaggacttcttcagaagaatgtgtgactgtgatatttgatgcggaagacggtgagcccattgaattcagctctcaccagactggggttgtcactgttaccagaaatgagatttccatcaattcaactcctgctggacccaaggcagaacatactgagcttttacctcagggaattgcttgtttacagccaagagctgctgcaagagactatactttctttaaaaggtctgaagaggacactgagaaaaacattccaaaagataatgtagataatgttcccagggtgtccactgaatctttcagctccaggacagtgacacaaaatcctcagcagcaaaagctggtcaaaccaacacacaatatatcatgccagagtaattccaggtcttcggcacccatgggcatctatcaaaagcaaaatctgacaaaaatacctcccaggggcaagtcttcacctcagaaatcaaaactaatggagcccgaagccaccacactactcccttcatctggcctggtgactcttgaaaaatcaccagccttagctcctgggaaactctcacgattcatgaagactgagagctcagggcccctctttgaattacgatcagatccacacattccaaaacattccgcccaacttccgcacagctccaggatgcccagcaggagggactgggtccagtgccccaagagtcagactccagggtcacggtcaaggcctgccattgagtctagtgacagtggagagccccccacgagggatgaacactgtggctctgggccggaggcaggggtgaaatccccttcccctccgccccctccaggcaggtccgtctccctgctggccaggcccagctatgactattcaccagcaccttcatccaccaagtccgaaaccagggtccccagtgaaacagcaaggaccccattcaaatccccgctgctgaaaggaatttctgctccagttatttcttctaatccggccacgacagaagtgcagaggaagaaaccttctgtggccttcaaaaagcctatcttcactcaccctatgccctccccagaagcagtcattcaaacccgatgccctgctcatgccccctccagctccttcaccgtaatggctctggggcctccaaaggtctctccgaagagaggtgtccccaaaacctctcctcgccaaacacttgggaccccacaaagggacataggattacagactcccaggatctctccttcaacccatgagccactggaaatgacgtcctccaaaagtgtatctccagggagaaaaggacaattgaatgatagcgcctccacaccccccaagccttccttcttaggggtaaatgagtcaccatcatctcaggtcagcagttcctcatcatcctcatcacccgccaaaagccataacagccctcatggttgtcaaagtgctcatgagaaaggactgaaaactcgccttccagtgggactcaaagtgctcatgaagtctccccagctgctcaggaaaagttccaccgtgccagggaaacatgaaaaagacagtttaaatgaagcctccaaaagttccgtggctgtgaacaagtctaagccagaggactccaagaatccagcaagcatggagatcacagcgggtgaaagaaatgtgaccctaccggattcacaagcacagggcagtttagctgatgggcttcccctggaaacagcactacaagagccattggaaagtagcatccctgggagtgatggaagggatggggtagataatagatccatgagaagatccctttcctccagcaaaccacacctaaaaccagctctgggtatgaatggcgccaaagcccgcagccacagcttcagtacacactcaggagacaagccttctacgccccccatcgaagggtcaggcaaagtccgcactcagatcattaccaataccgccgagagaggcaattctcttacccggcagaactcttccacggaaagctctcccaacaaggccccttctgctcccatgttggagagtctccccagtgttgggaggccctcggggcacccctcctccgggaagggctccctggggagctcaggcagcttcagcagtcagcatgggagcccaagtaagttgcctttgaggatccctccaaagtctgagggactcctcatcccacctggaaaggaagaccagcaggccttcacccagggagagtgccccagtgccaatgtggctgtacttggggaaccaggcagtgaccgccgcagttgcccacccaccccaacagactgccctgaagccctgcagagcccagggaggactcagcatccaagcacttttgaaacaagcagtacatccaagctagaaacttctggaaggcatccagatgcctctgcaaccgcgactgatgctgtgagttcagaagcccccctctcacccacaatcgaagaaaaggtcatgttgtgcattcaggaaaatgtggaaaagggccaagtgcaaacaaagcccacctctgtggaagcaaagcagaagcctgggccttcttttgccagctggtttggttttcggaagagtagacttccagctctgagtagcaggaaaatggacatctccaaaaccaaagtagaaaagaaagatgcaaaagtcttggggtttggaaacagacaactaaaatcagaaagaaaaaaagagaaaaagaagcctgaactacagtgtgagacagaaaatgagcttatcaaggacaccaagtcagcagataatccagatggcggtttacaaagcaaaaataatcggagaacaccacaagacatttacaaccaactgaagattgaaccaaggaatagacacagccctgttgcatgttcaacgaaagacaccttcatgacggaactcttgaacagagttgataagaaagcagctccacagacagaaagtggatcaagtaatgcttcctgcaggaatgtgttaaagggcagttctcagggctcctgtctcatcggcagctctatcagtactcaaggaaaccacaagaaaaacatgaaaatcaaagccgatatggaagtaccaaaagactccctggtaaaagaggcaaatgaaaacttgcaagaggatgaagacgatgcagttgcagattctgtatttcagagccacatcatagaatccaactgccagatgagaacattggacagtgggatcggaacctttccactcccagactcgggaaatcgctcgacaggacgctacctatgccagccagactccccagaggacgctgagcctctcctgcctctccagtcagccctttctgcagtttcttccatgagagcccaaacccttgaacgtgaagtgccttcctccacagacggccagcgccctgcagatagcgccattgttcattccacatccgaccccatcatgaccgccagagggatgaggcctcttcagagccgcctccccaaaccagcttcctcaggaaaagtcagttcccaaaagcagaatgaagcagagccaaggcctcagacatgctcatcattcggatatgctgaagacccaatggcaagccagccgcttccagactgggggagtgaagttgctgccaccgggacccaggacaaggcacccagaatgtgtacgtactctgccagcggtggcagtaatagtgacagtgacctggactatggagataatggttttggagctggaaggggacagttagtgaaagcactgaagagcgctgccccagaaattgagacaacttgaagaaacaaaagacgatcccgagaatagattatcgaaaatttccctagagtcattcaataaatttaacagcaatactgtgattttattagaaaaagagaagaactctctgaacaaggttgaaggacagaaggaagaaaaagaaaaaaatgaagagacatctttgagtagttcagataggcctggggtagacaacttggaatctttgagtgattctttatatgatagcttctcttcctgtgccagtcaaggttcaaatgatgtataaaggacatctcttcccttagtgagctgggactggagcgcttaagaaatgatgggtggggggtggggggtgcaccgcttgatagagataacaataaactattgcagtaccagagccttccttgtcaaattcacagcaggcaacccaccagagcttatttctctgacagggcaataaagatagactccatttattgtgtttcaagaggattaagcgtaaacacatctatgatacagaatccttaattttgcactttttttgaatatttgtacagaagttgtaaattttttggaagagaaattatatttgtagcaaaaaaagacagcaataaatggaatcagtgccatgctcttgaaataatgtactaagtcttagaagttgatgataatatatattttttaaaatcccaactgaagtttttgtgaagttcgttgtcctggtcctcaaattgtttgtgggtacactctgtaaacctacaacagggcctgccaaaaaatcggagggttcctcctcatctccatctcacaaatctcaatttgatggaaatgttcattttagtgtaatttcagattcgttgccagagattcaggtgatagtaataagtgtcattctgcttctgctgaaaaatgaaaagggtcctgaagtgtggacactgattgggagtgtgacattgtatcagaaatgaccgaattctattcccaataccagtttttccttccagacatttctttagattgtcttttacttagtgcttctctatgatcctgaatattatttgatttttatcttcttgctctttttattaaaatctgggcactctaaaaatgaaaacaaatttctatttgcaatgttcacttttaaaaataaaattaatggtgctacgaagaattctttttaatatccttttttttctacaaagactgtttatatgtaaggataaattctattttaaaggttatgtgtattttttctagatgtgaactatttataattacttatgtacaggagcttgtaaactaggcccaatagaaatatttttaggatctatatggctactttagcacataattgtttctttaaagagtattgtatgatcagtgttatttggttaatttgtgcaatttgttttattttatcttaaatgaaaattatgtaaaatgtccttgtctttcagactttaaaaaatctttttgtttcctttctgaataaaagttatatcacatttgcaaaaaaaaaaaaaaaaaa

SEQ ID NO: 85 - protein, 354 aa, Homo sapiens
MAEVLRTLAGKPKCHALRPMILFLIMLVLVLFGYGVLSPRSLMPGSLERGFCMAVREPDHLQRVSLPRMVYPQPKVLTPCRKDVLVVTPWLAPIVWEGTFNIDILNEQFRLQNTTIGLTVFAIKKYVAFLKLFLETAEKHFMVGHRVHYYVFTDQPAAVPRVTLGTGRQLSVLEVRAYKRWQDVSMRRMEMISDFCERRFLSEVDYLVCVDVDMEFRDHVGVEILTPLFGTLHPGFYGSSREAFTYERRPQSQAYIPKDEGDFYYLGGFFGGSVQEVQRLTRACHQAMMVDQANGIEAVWHDESHLNKYLLRHKPTKVLSPEYLWDQQLLGWPAVLRKLRFTAVPKNHQAVRNP

SEQ ID NO: 86 - protein, 512 aa, Homo sapiens
MTAPWVALALLWGSLCAGSGRGEAETRECIYYNANWELERTNQSGLERCEGEQDKRLHCYASWRNSSGTIELVKKGCWLDDFNCYDRQECVATEENPQVYFCCCEGNFCNERFTHLPEAGGPEVTYEPPPTAPTLLTVLAYSLLPIGGLSLIVLLAFWMYRHRKPPYGHVDIHEDPGPPPPSPLVGLKPLQLLEIKARGRFGCVWKAQLMNDFVAVKIFPLQDKQSWQSEREIFSTPGMKHENLLQFIAAEKRGSNLEVELWLITAFHDKGSLTDYLKGNIITWNELCHVAETMSRGLSYLHEDVPWCRGEGHKPSIAHRDFKSKNVLLKSDLTAVLADFGLAVRFEPGKPPGDTHGQVGTRRYMAPEVLEGAINFQRDAFLRIDMYAMGLVLWELVSRCKAADGPVDEYMLPFEEEIGQHPSLEELQEVVVHKKMRPTIKDHWLKHPGLAQLCVTIEECWDHDAEARLSAGCVEERVSLIRRSVNGTTSDCLVSLVTSVTNVDLPPKESSI

SEQ ID NO: 87 - protein, 345 aa, Homo sapiens
MISPVLILFSSFLCHVAIAGRTCPKPDDLPFSTVVPLKTFYEPGEEITYSCKPGYVSRGGMRKFICPLTGLWPINTLKCTPRVCPFAGILENGAVRYTTFEYPNTISFSCNTGFYLNGADSAKCTEEGKWSPELPVCAPIICPPPSIPTFATLRVYKPSAGNNSLYRDTAVFECLPQHAMFGNDTITCTTHGNWTKLPECREVKCPFPSRPDNGFVNYPAKPTLYYKDKATFGCHDGYSLDGPEEIECTKLGNWSAMPSCKASCKVPVKKATVVYQGERVKIQEKFKNGMLHGDKVSFFCKNKEKKCSYTEDAQCIDGTIEVPKCFKEHSSLAFWKTDASDVKPC

SEQ ID NO: 88 - protein, 271 aa, Homo sapiens
MWELRSIAFSRAVFAEFLATLLFVFFGLGSALNWPQALPSVLQIAMAFGLGIGTLVQALGHISGAHINPAVTVACLVGCHVSVLRAAFYVAAQLLGAVAGAALLHEITPADIRGDLAVNALSNSTTAGQAVTVELFLTLQLVLCIFASTDERRGENPGTPALSIGFSVALGHLLGIHYTGCSMNPARSLAPAVVTGKFDDHWVFWIGPLVGAILGSLLYNYVLFPPAKSLSERLAVLKGLEPDTDWEEREVRRRQSVELHSPQSLPRGTKA

SEQ ID NO: 89 - protein, 389 aa, Homo sapiens
MNCCIGLGEKARGSHRASYPSLSALFTEASILGFGSFAVKAQWTEDCRKSTYPPSGPTVFPAVIRYRGAVPWYTINLDLPPYKRWHELMLDKAPVPGLLGNFPGPFEEEMKGIAAVTDIPLGEIISFNIFYELFTICTSIVAEDKKGHLIHGRNMDFGVFLGWNINNDTWVITEQLKPLTVNLDFQRNNKTVFKASSFAGYVGMLTGFKPGLFSLTLNERFSINGGYLGILEWILGKKDVMWIGFLTRTVLENSTSYEEAKNLLTKTKILAPAYFILGGNQSGEGCVITRDRKESLDVYELDAKQGRWYVVQTNYDRWKHPFFLDDRRTPAKMCLNRTSQENISFETMYDVLSTKPVLNKLTVYTTLIDVTKGQFETYLRDCPDPCIGW

SEQ ID NO: 90 - protein, 622 aa, Homo sapiens
MAHVRGLQLPGCLALAALCSLVHSQHVFLAPQQARSLLQRVRRANTFLEEVRKGNLERECVEETCSYEEAFEALESSTATDVFWAKYTACETARTPRDKLAACLEGNCAEGLGTNYRGHVNITRSGIECQLWRSRYPHKPEINSTTHPGADLQENFCRNPDSSTTGPWCYTTDPTVRRQECSIPVCGQDQVTVAMTPRSEGSSVNLSPPLEQCVPDRGQQYQGRLAVTTHGLPCLAWASAQAKALSKHQDFNSAVQLVENFCRNPDGDEEGVWCYVAGKPGDFGYCDLNYCEEAVEEETGDGLDEDSDRAIEGRTATSEYQTFFNPRTFGSGEADCGLRPLFEKKSLEDKTERELLESYIDGRIVEGSDAEIGMSPWQVMLFRKSPQELLCGASLISDRWVLTAAHCLLYPPWDKNFTENDLLVRIGKHSRTRYERNIEKISMLEKIYIHPRYNWRENLDRDIALMKLKKPVAFSDYIHPVCLPDRETAASLLQAGYKGRVTGWGNLKETWTANVGKGQPSVLQVVNLPIVERPVCKDSTRIRITDNMFCAGYKPDEGKRGDACEGDSGGPFVMKSPFNNRWYQMGIVSWGEGCDRDGKYGFYTHVFRLKKWIQKVIDQFGE

SEQ ID NO: 91 - protein, 397 aa, Homo sapiens
MRSPSAAWLLGAAILLAASLSCSGTIQGTNRSSKGRSLIGKVDGTSHVTGKGVTVETVFSVDEFSASVLTGKLTTVFLPIVYTIVFVVGLPSNGMALWVFLFRTKKKHPAVIYMANLALADLLSVIWFPLKIAYHIHGNNWIYGEALCNVLIGFFYGNMYCSILFMTCLSVQRYWVIVNPMGHSRKKANIAIGISLAIWLLILLVTIPLYVVKQTIFIPALNITTCHDVLPEQLLVGDMFNYFLSLAIGVFLFPAFLTASAYVLMIRMLRSSAMDENSEKKRKRAIKLIVTVLAMYLICFTPSNLLLVVHYFLIKSQGQSHVYALYIVALCLSTLNSCIDPFVYYFVSHDFRDHAKNALLCRSVRTVKQMQVSLTSKKHSRKSSSYSSSSTTVKTSY

SEQ ID NO: 92 - protein, 2224 aa, Homo sapiens
MFPGCPRLWVLVVLGTSWVGWGSQGTEAAQLRQFYVAAQGISWSYRPEPTNSSLNLSVTSFKKIVYREYEPYFKKEKPQSTISGLLGPTLYAEVGDIIKVHFKNKADKPLSIHPQGIRYSKLSEGASYLDHTFPAEKMDDAVAPGREYTYEWSISEDSGPTHDDPPCLTHIYYSHENLIEDFNSGLIGPLLICKKGTLTEGGTQKTFDKQIVLLFAVFDESKSWSQSSSLMYTVNGYVNGTMPDITVCAHDHISWHLLGMSSGPELFSIHFNGQVLEQNHHKVSAITLVSATSTTANMTVGPEGKWIISSLTPKHLQAGMQAYIDIKNCPKKTRNLKKITREQRRHMKRWEYFIAAEEVIWDYAPVIPANMDKKYRSQHLDNFSNQIGKHYKKVMYTQYEDESFTKHTVNPNMKEDGILGPIIRAQVRDTLKIVFKNMASRPYSIYPHGVTFSPYEDEVNSSFTSGRNNTMIRAVQPGETYTYKWNILEFDEPTENDAQCLTRPYYSDVDIMRDIASGLIGLLLICKSRSLDRRGIQRAADIEQQAVFAVFDENKSWYLEDNINKFCENPDEVKRDDPKFYESNIMSTINGYVPESITTLGFCFDDTVQWHFCSVGTQNEILTIHFTGHSFIYGKRHEDTLTLFPMRGESVTVTMDNVGTWMLTSMNSSPRSKKLRLKFRDVKCIPDDDEDSYEIFEPPESTVMATRKMHDRLEPEDEESDADYDYQNRLAAALGIRSFRNSSLNQEEEEFNLTALALENGTEFVSSNTDIIVGSNYSSPSNISKFTVNNLAEPQKAPSHQQATTAGSPLRHLIGKNSVLNSSTAEHSSPYSEDPIEDPLQPDVTGIRLLSLGAGEFKSQEHAKHKGPKVERDQAAKHRFSWMKLLAHKVGRHLSQDTGSPSGMRPWEDLPSQDTGSPSRMRPWKDPPSDLLLLKQSNSSKILVGRWHLASEKGSYEIIQDTDEDTAVNNWLISPQNASRAWGESTPLANKPGKQSGHPKFPRVRHKSLQVRQDGGKSRLKKSQFLIKTRKKKKEKHTHHAPLSPRTFHPLRSEAYNTFSERRLKHSLVLHKSNETSLPTDLNQTLPSMDFGWIASLPDHNQNSSNDTGQASCPPGLYQTVPPEEHYQTFPIQDPDQMHSTSDPSHRSSSPELSEMLEYDRSHKSFPTDISQMSPSSEHEVWQTVISPDLSQVTLSPELSQTNLSPDLSHTTLSPELIQRNLSPALGQMPISPDLSHTTLSPDLSHTTLSLDLSQTNLSPELSQTNLSPALGQMPLSPDLSHTTLSLDFSQTNLSPELSHMTLSPELSQTNLSPALGQMPISPDLSHTTLSLDFSQTNLSPELSQTNLSPALGQMPLSPDPSHTTLSLDLSQTNLSPELSQTNLSPDLSEMPLFADLSQIPLTPDLDQMTLSPDLGETDLSPNFGQMSLSPDLSQVTLSPDISDTTLLPDLSQISPPPDLDQIFYPSESSQSLLLQEFNESFPYPDLGQMPSPSSPTLNDTFLSKEFNPLVIVGLSKDGTDYIEIIPKEEVQSSEDDYAEIDYVPYDDPYKTDVRTNINSSRDPDNIAAWYLRSNNGNRRNYYIAAEEISWDYSEFVQRETDIEDSDDIPEDTTYKKVVFRKYLDSTFTKRDPRGEYEEHLGILGPIIRAEVDDVIQVRFKNLASRPYSLHAHGLSYEKSSEGKTYEDDSPEWFKEDNAVQPNSSYTYVWHATERSGPESPGSACRAWAYYSAVNPEKDIHSGLIGPLLICQKGILHKDSNMPMDMREFVLLFMTFDEKKSWYYEKKSRSSWRLTSSEMKKSHEFHAINGMIYSLPGLKMYEQEWVRLHLLNIGGSQDIHVVHFHGQTLLENGNKQHQLGVWPLLPGSFKTLEMKASKPGWWLLNTEVGENQRAGMQTPFLIMDRDCRMPMGLSTGIISDSQIKASEFLGYWEPRLARLNNGGSYNAWSVEKLAAEFASKPWIQVDMQKEVIITGIQTQGAKHYLKSCYTTEFYVAYSSNQINWQIFKGNSTRNVMYFNGNSDASTIKENQFDPPIVARYIRISPTRAYNRPTLRLELQGCEVNGCSTPLGMENGKIENKQITASSFKKSWWGDYWEPFRARLNAQGRVNAWQAKANNNKQWLEIDLLKIKKITAIITQGCKSLSSEMYVKSYTIHYSEQGVEWKPYRLKSSMVDKIFEGNTNTKGHVKNFFNPPIISRFIRVIPKTWNQSIALRLELFGCDIY

SEQ ID NO: 93 - protein, 461 aa, Homo sapiens
MQRVNMIMAESPGLITICLLGYLLSAECTVFLDHENANKILNRPKRYNSGKLEEFVQGNLERECMEEKCSFEEAREVFENTERTTEFWKQYVDGDQCESNPCLNGGSCKDDINSYECWCPFGFEGKNCELDVTCNIKNGRCEQFCKNSADNKVVCSCTEGYRLAENQKSCEPAVPFPCGRVSVSQTSKLTRAETVFPDVDYVNSTEAETILDNITQSTQSFNDFTRVVGGEDAKPGQFPWQVVLNGKVDAFCGGSIVNEKWIVTAAHCVETGVKITVVAGEHNIEETEHTEQKRNVIRIIPHHNYNAAINKYNHDIALLELDEPLVLNSYVTPICIADKEYTNIFLKFGSGYVSGWGRVFHKGRSALVLQYLRVPLVDRATCLRSTKFTIYNNMFCAGFHEGGRDSCQGDSGGPHVTEVEGTSFLTGIISWGEECAMKGKYGIYTKVSRYVNWIKEKTKLT

SEQ ID NO: 94 - protein, 625 aa, Homo sapiens
MIFLYQVVHFILFTSVSGECVTQLLKDTCFEGGDITTVFTPSAKYCQVVCTYHPRCLLFTFTAESPSEDPTRWFTCVLKDSVTETLPRVNRTAAISGYSFKQCSHQISACNKDIYVDLDMKGINYNSSVAKSAQECQERCTDDVHCHFFTYATRQFPSLEHRNICLLKHTQTGTPTRITKLDKVVSGFSLKSCALSNLACIRDIFPNTVFADSNIDSVMAPDAFVCGRICTHHPGCLFFTFFSQEWPKESQRNLCLLKTSESGLPSTRIKKSKALSGFSLQSCRHSIPVFCHSSFYHDTDFLGEELDIVAAKSHEACQKLCTNAVRCQFFTYTPAQASCNEGKGKCYLKLSSNGSPTKILHGRGGISGYTLRLCKMDNECTTKIKPRIVGGTASVRGEWPWQVTLHTTSPTQRHLCGGSIIGNQWILTAAHCFYGVESPKILRVYSGILNQSEIKEDTSFFGVQEIIIHDQYKMAESGYDIALLKLETTVNYTDSQRPICLPSKGDRNVIYTDCWVTGWGYRKLRDKIQNTLQKAKIPLVTNEECQKRYRGHKITHKMICAGYREGGKDACKGDSGGPLSCKHNEVWHLVGITSWGEGCAQRERPGVYTNVVEYVDWILEKTQAV

SEQ ID NO: 95 - protein, 866 aa, Homo sapiens
MFSMRIVCLVLSVVGTAWTADSGEGDFLAEGGGVRGPRVVERHQSACKDSDWPFCSDEDWNYKCPSGCRMKGLIDEVNQDFTNRINKLKNSLFEYQKNNKDSHSLTTNIMEILRGDFSSANNRDNTYNRVSEDLRSRIEVLKRKVIEKVQHIQLLQKNVRAQLVDMKRLEVDIDIKIRSCRGSCSRALAREVDLKDYEDQQKQLEQVIAKDLLPSRDRQHLPLIKMKPVPDLVPGNFKSQLQKVPPEWKALTDMPQMRMELERPGGNEITRGGSTSYGTGSETESPRNPSSAGSWNSGSSGPGSTGNRNPGSSGTGGTATWKPGSSGPGSTGSWNSGSSGTGSTGNQNPGSPRPGSTGTWNPGSSERGSAGHWTSESSVSGSTGQWHSESGSFRPDSPGSGNARPNNPDWGTFEEVSGNVSPGTRREYHTEKLVTSKGDKELRTGKEKVTSGSTTTTRRSCSKTVTKTVIGPDGHKEVTKEVVTSEDGSDCPEAMDLGTLSGIGTLDGFRHRHPDEAAFFDTASTGKTFPGFFSPMLGEFVSETESRGSESGIFTNTKESSSHHPGIAEFPSRGKSSSYSKQFTSSTSYNRGDSTFESKSYKMADEAGSEADHEGTHSTKRGHAKSRPVRDCDDVLQTHPSGTQSGIFNIKLPGSSKIFSVYCDQETSLGGWLLIQQRMDGSLNFNRTWQDYKRGFGSLNDEGEGEFWLGNDYLHLLTQRGSVLRVELEDWAGNEAYAEYHFRVGSEAEGYALQVSSYEGTAGDALIEGSVEEGAEYTSHNNMQFSTFDRDADQWEENCAEVYGGGWWYNNCQAANLNGIYYPGGSYDPRNNSPYEIENGVVWVSFRGADYSLRAVRMKIRPLVTQ

SEQ ID NO: 96 - protein, 644 aa, Homo sapiens
MFSMRIVCLVLSVVGTAWTADSGEGDFLAEGGGVRGPRVVERHQSACKDSDWPFCSDEDWNYKCPSGCRMKGLIDEVNQDFTNRINKLKNSLFEYQKNNKDSHSLTTNIMEILRGDFSSANNRDNTYNRVSEDLRSRIEVLKRKVIEKVQHIQLLQKNVRAQLVDMKRLEVDIDIKIRSCRGSCSRALAREVDLKDYEDQQKQLEQVIAKDLLPSRDRQHLPLIKMKPVPDLVPGNFKSQLQKVPPEWKALTDMPQMRMELERPGGNEITRGGSTSYGTGSETESPRNPSSAGSWNSGSSGPGSTGNRNPGSSGTGGTATWKPGSSGPGSTGSWNSGSSGTGSTGNQNPGSPRPGSTGTWNPGSSERGSAGHWTSESSVSGSTGQWHSESGSFRPDSPGSGNARPNNPDWGTFEEVSGNVSPGTRREYHTEKLVTSKGDKELRTGKEKVTSGSTTTTRRSCSKTVTKTVIGPDGHKEVTKEVVTSEDGSDCPEAMDLGTLSGIGTLDGFRHRHPDEAAFFDTASTGKTFPGFFSPMLGEFVSETESRGSESGIFTNTKESSSHHPGIAEFPSRGKSSSYSKQFTSSTSYNRGDSTFESKSYKMADEAGSEADHEGTHSTKRGHAKSRPVRGIHTSPLGKPSLSP

SEQ ID NO: 97 - protein, 432 aa, Homo sapiens
MKRMVSWSFHKLKTMKHLLLLLLCVFLVKSQGVNDNEEGFFSARGHRPLDKKREEALLQQERPIRNSVDELNNNVEAVSQTSSSSFQYMYLLKDLWQKRQKQVKDNENVVNEYSSELEKHQLYIDETVNSNIPTNLRVLRSILENLRSKIQKLESDVSAQMEYCRTPCTVSCNIPVVSGKECEEIIRKGGETSEMYLIQPDSSVKPYRVYCDMNTENGGWTVIQNRQDGSVDFGRKWDPYKQGFGNVATNTDGKNYCGLPGEYWLGNDKISQLTRMGPTELLIEMEDWKGDKVKAHYGGFTVQNEANKYQISVNKYRGTAGNALMDGASQLMGENRTMTIHNGMFFSTYDRDNDGWLTSDPRKQCSKEDGGGWWYNRCHAANPNGRYYWGGQYTWDMAKHGTDDGVVWMNWKGSWYSMRKMSMKIRPFFPQQ

SEQ ID NO: 98 - protein, 491 aa, Homo sapiens
MKRMVSWSFHKLKTMKHLLLLLLCVFLVKSQGVNDNEEGFFSARGHRPLDKKREEAPSLRPAPPPISGGGYRARPAKAAATQKKVERKAPDAGGCLHADPDLGVLCPTGCQLQEALLQQERPIRNSVDELNNNVEAVSQTSSSSFQYMYLLKDLWQKRQKQVKDNENVVNEYSSELEKHQLYIDETVNSNIPTNLRVLRSILENLRSKIQKLESDVSAQMEYCRTPCTVSCNIPVVSGKECEEIIRKGGETSEMYLIQPDSSVKPYRVYCDMNTENGGWTVIQNRQDGSVDFGRKWDPYKQGFGNVATNTDGKNYCGLPGEYWLGNDKISQLTRMGPTELLIEMEDWKGDKVKAHYGGFTVQNEANKYQISVNKYRGTAGNALMDGASQLMGENRTMTIHNGMFFSTYDRDNDGWLTSDPRKQCSKEDGGGWWYNRCHAANPNGRYYWGGQYTWDMAKHGTDDGVVWMNWKGSWYSMRKMSMKIRPFFPQQ

SEQ ID NO: 99 - protein, 453 aa, Homo sapiens
MSWSLHPRNLILYFYALLFLSSTCVAYVATRDNCCILDERFGSYCPTTCGIADFLSTYQTKVDKDLQSLEDILHQVENKTSEVKQLIKAIQLTYNPDESSKPNMIDAATLKSRKMLEEIMKYEASILTHDSSIRYLQEIYNSNNQKIVNLKEKVAQLEAQCQEPCKDTVQIHDITGKDCQDIANKGAKQSGLYFIKPLKANQQFLVYCEIDGSGNGWTVFQKRLDGSVDFKKNWIQYKEGFGHLSPTGTTEFWLGNEKIHLISTQSAIPYALRVELEDWNGRTSTADYAMFKVGPEADKYRLTYAYFAGGDAGDAFDGFDFGDDPSDKFFTSHNGMQFSTWDNDNDKFEGNCAEQDGSGWWMNKCHAGHLNGVYYQGGTYSKASTPNGYDNGIIWATWKTRWYSMKKTTMKIIPFNRLTIGEGQQHHLGGAKQVRPEHPAETEYDSLYPEDDL

SEQ ID NO: 100 - protein, 245 aa, Homo sapiens
MAVRASFENNCEIGCFAKLTNTYCLVAIGGSENFYSVFEGELSDTIPVVHASIAGCRIIGRMCVGNRHGLLVPNNTTDQELQHIRNSLPDTVQIRRVEERLSALGNVTTCNDYVALVHPDLDRETEEILADVLKVEVFRQTVADQVLVGSYCVFSNQGGLVHPKTSIEDQDELSSLLQVPLVAGTVNRGSEVIAAGMVVNDWCAFCGLDTTSTELSVVESVFKLNEAQPSTIATSMRDSLIDSLT

SEQ ID NO: 101 - protein, 226 aa, Homo sapiens
MAVRASFENNCEIGCFAKLTNTYCLVAIGGSENFYRCGGSPGAYGGGEACAGVKSSGSGRVPAPLPRHHRVHVPTVCSRASSPIPSPWCTRLSPAAASSGACVWETEEILADVLKVEVFRQTVADQVLVGSYCVFSNQGGLVHPKTSIEDQDELSSLLQVPLVAGTVNRGSEVIAAGMVVNDWCAFCGLDTTSTELSVVESVFKLNEAQPSTIATSMRDSLIDSLT

SEQ ID NO: 102 - protein, 245 aa, Homo sapiens; identical to SEQ ID NO: 100

SEQ ID NO: 103 - protein, 638 aa, Homo sapiens
MILFKQATYFISLFATVSCGCLTQLYENAFFRGGDVASMYTPNAQYCQMRCTFHPRCLLFSFLPASSINDMEKRFGCFLKDSVTGTLPKVHRTGAVSGHSLKQCGHQISACHRDIYKGVDMRGVNFNVSKVSSVEECQKRCTSNIRCQFFSYATQTFHKAEYRNNCLLKYSPGGTPTAIKVLSNVESGFSLKPCALSEIGCHMNIFQHLAFSDVDVARVLTPDAFVCRTICTYHPNCLFFTFYTNVWKIESQRNVCLLKTSESGTPSSSTPQENTISGYSLLTCKRTLPEPCHSKIYPGVDFGGEELNVTFVKGVNVCQETCTKMIRCQFFTYSLLPEDCKEEKCKCFLRLSMDGSPTRIAYGTQGSSGYSLRLCNTGDNSVCTTKTSTRIVGGTNSSWGEWPWQVSLQVKLTAQRHLCGGSLIGHQWVLTAAHCFDGLPLQDVWRIYSGILNLSDITKDTPFSQIKEIIIHQNYKVSEGNHDIALIKLQAPLNYTEFQKPICLPSKGDTSTIYTNCWVTGWGFSKEKGEIQNILQKVNIPLVTNEECQKRYQDYKITQRMVCAGYKEGGKDACKGDSGGPLVCKHNGMWRLVGITSWGEGCARREQPGVYTKVAEYMDWILEKTQSSDGKAQMQSPA

SEQ ID NO: 104 - protein, 454 aa, Homo sapiens
MYNTVWNMEDLDLEYAKTDINCGTDLMFYIEMDPPALPPKPPKPTTVANNGMNNNMSLQDAEWYWGDISREEVNEKLRDTADGTFLVRDASTKMHGDYTLTLRKGGNNKLIKIFHRDGKYGFSDPLTFSSVVELINHYRNESLAQYNPKLDVKLLYPVSKYQQDQVVKEDNIEAVGKKLHEYNTQFQEKSREYDRLYEEYTRTSQEIQMKRTAIEAFNETIKIFEEQCQTQERYSKEYIEKFKREGNEKEIQRIMHNYDKLKSRISEIIDSRRRLEEDLKKQAAEYREIDKRMNSIKPDLIQLRKTRDQYLMWLTQKGVRQKKLNEWLGNENTEDQYSLVEDDEDLPHHDEKTWNVGSSNRNKAENLLRGKRDGTFLVRESSKQGCYACSVVVDGEVKHCVINKTATGYGFAEPYNLYSSLKELVLHYQHTSLVQHNDSLNVTLAYPVYAQQRR

SEQ ID NO: 105 - protein, 724 aa, Homo sapiens
MSAEGYQYRALYDYKKEREEDIDLHLGDILTVNKGSLVALGFSDGQEARPEEIGWLNGYNETTGERGDFPGTYVEYIGRKKISPPTPKPRPPRPLPVAPGSSKTEADVEQQALTLPDLAEQFAPPDIAPPLLIKLVEAIEKKGLECSTLYRTQSSSNLAELRQLLDCDTPSVDLEMIDVHVLADAFKRYLLDLPNPVIPAAVYSEMISLAPEVQSSEEYIQLLKKLIRSPSIPHQYWLTLQYLLKHFFKLSQTSSKNLLNARVLSEIFSPMLFRFSAASSDNTENLIKVIEILISTEWNERQPAPALPPKPPKPTTVANNGMNNNMSLQDAEWYWGDISREEVNEKLRDTADGTFLVRDASTKMHGDYTLTLRKGGNNKLIKIFHRDGKYGFSDPLTFSSVVELINHYRNESLAQYNPKLDVKLLYPVSKYQQDQVVKEDNIEAVGKKLHEYNTQFQEKSREYDRLYEEYTRTSQEIQMKRTAIEAFNETIKIFEEQCQTQERYSKEYIEKFKREGNEKEIQRIMHNYDKLKSRISEIIDSRRRLEEDLKKQAAEYREIDKRMNSIKPDLIQLRKTRDQYLMWLTQKGVRQKKLNEWLGNENTEDQYSLVEDDEDLPHHDEKTWNVGSSNRNKAENLLRGKRDGTFLVRESSKQGCYACSVVVDGEVKHCVINKTATGYGFAEPYNLYSSLKELVLHYQHTSLVQHNDSLNVTLAYPVYAQQRR

SEQ ID NO: 106 - protein, 424 aa, Homo sapiens
MHNLQTLPPKPPKPTTVANNGMNNNMSLQDAEWYWGDISREEVNEKLRDTADGTFLVRDASTKMHGDYTLTLRKGGNNKLIKIFHRDGKYGFSDPLTFSSVVELINHYRNESLAQYNPKLDVKLLYPVSKYQQDQVVKEDNIEAVGKKLHEYNTQFQEKSREYDRLYEEYTRTSQEIQMKRTAIEAFNETIKIFEEQCQTQERYSKEYIEKFKREGNEKEIQRIMHNYDKLKSRISEIIDSRRRLEEDLKKQAAEYREIDKRMNSIKPDLIQLRKTRDQYLMWLTQKGVRQKKLNEWLGNENTEDQYSLVEDDEDLPHHDEKTWNVGSSNRNKAENLLRGKRDGTFLVRESSKQGCYACSVVVDGEVKHCVINKTATGYGFAEPYNLYSSLKELVLHYQHTSLVQHNDSLNVTLAYPVYAQQRR

SEQ ID NO: 107 - protein, 514 aa, Homo sapiens
MVEEVQKHSVHTLVFRSLKRTHDMFVADNGKPVPLDEESHKRKMAIKLRNEYGPVLHMPTSKENLKEKGPQNATDSYVHKQYPANQGQEVEYFVAGTHPYPPGPGVALTADTKIQRMPSESAAQSLAVALPLQTKADANRTAPSGSEYRHPGASDRPQPTAMNSIVMETGNTKNSALMAKKAPTMPKPQWHPPWKLYRVISGHLGWVRCIAVEPGNQWFVTGSADRTIKIWDLASGKLKLSLTGHISTVRGVIVSTRSPYLFSCGEDKQVKCWDLEYNKVIRHYHGHLSAVYGLDLHPTIDVLVTCSRDSTARIWDVRTKASVHTLSGHTNAVATVRCQAAEPQIITGSHDTTIRLWDLVAGKTRVTLTNHKKSVRAVVLHPRHYTFASGSPDNIKQWKFPDGSFIQNLSGHNAIINTLTVNSDGVLVSGADNGTMHLWDWRTGYNFQRVHAAVQPGSLDSESGIFACAFDQSESRLLTAEADKTIKVYREDDTATEETHPVSWKPEIIKRKRF

SEQ ID NO: 108 - protein, 622 aa, Homo sapiens
MKENVASATVFTLLLFLNTCLLNGQLPPGKPEIFKCRSPNKETFTCWWRPGTDGGLPTNYSLTYHREGETLMHECPDYITGGPNSCHFGKQYTSMWRTYIMMVNATNQMGSSFSDELYVDVTYIVQPDPPLELAVEVKQPEDRKPYLWIKWSPPTLIDLKTGWFTLLYEIRLKPEKAAEWEIHFAGQQTEFKILSLHPGQKYLVQVRCKPDHGYWSAWSPATFIQIPSDFTMNDTTVWISVAVLSAVICLIIVWAVALKGYSMVTCIFPPVPGPKIKGFDAHLLEKGKSEELLSALGCQDFPPTSDYEDLLVEYLEVDDSEDQHLMSVHSKEHPSQGMKPTYLDPDTDSGRGSCDSPSLLSEKCEEPQANPSTFYDPEVIEKPENPETTHTWDPQCISMEGKIPYFHAGGSKCSTWPLPQPSQHNPRSSYHNITDVCELAVGPAGAPATLLNEAGKDALKSSQTIKSREEGKATQQREVESFHSETDQDTPWLLPQEKTPFGSAKPLDYVEIHKVNKDGALSLLPKQRENSGKPKKPGTPENNKEYAKVSGVMDNNILVLVPDPHAKNVACFEESAKEAPPSLEQNQAEKALANFTATSSKCRLQLGGLDYLDPACFTHSFH

SEQ ID NO: 109 - protein, 461 aa, Homo sapiens
MWQLTSLLLFVATWGISGTPAPLDSVFSSSERAHQVLRIRKRANSFLEELRHSSLERECIEEICDFEEAKEIFQNVDDTLAFWSKHVDGDQCLVLPLEHPCASLCCGHGTCIDGIGSFSCDCRSGWEGRFCQREVSFLNCSLDNGGCTHYCLEEVGWRRCSCAPGYKLGDDLLQCHPAVKFPCGRPWKRMEKKRSHLKRDTEDQEDQVDPRLIDGKMTRRGDSPWQVVLLDSKKKLACGAVLIHPSWVLTAAHCMDESKKLLVRLGEYDLRRWEKWELDLDIKEVFVHPNYSKSTTDNDIALLHLAQPATLSQTIVPICLPDSGLAERELNQAGQETLVTGWGYHSSREKEAKRNRTFVLNFIKIPVVPHNECSEVMSNMVSENMLCAGILGDRQDACEGDSGGPMVASFHGTWFLVGLVSWGEGCGLLHNYGVYTKVSRYLDWIHGHIRDKEAPQKSWAP

SEQ ID NO: 110 - protein, 610 aa, Homo sapiens
MIASQFLSALTLVLLIKESGAWSYNTSTEAMTYDEASAYCQQRYTHLVAIQNKEEIEYLNSILSYSPSYYWIGIRKVNNVWVWVGTQKPLTEEAKNWAPGEPNNRQKDEDCVEIYIKREKDVGMWNDERCSKKKLALCYTAACTNTSCSGHGECVETINNYTCKCDPGFSGLKCEQIVNCTALESPEHGSLVCSHPLGNFSYNSSCSISCDRGYLPSSMETMQCMSSGEWSAPIPACNVVECDAVTNPANGFVECFQNPGSFPWNTTCTFDCEEGFELMGAQSLQCTSSGNWDNEKPTCKAVTCRAVRQPQNGSVRCSHSPAGEFTFKSSCNFTCEEGFMLQGPAQVECTTQGQWTQQIPVCEAFQCTALSNPERGYMNCLPSASGSFRYGSSCEFSCEQGFVLKGSKRLQCGPTGEWDNEKPTCEAVRCDAVHQPPKGLVRCAHSPIGEFTYKSSCAFSCEEGFELHGSTQLECTSQGQWTEEVPSCQVVKCSSLAVPGKINMSCSGEPVFGTVCKFACPEGWTLNGSAARTCGATGHWSGLLPTCEAPTESNIPLVAGLSAAGLSLLTLAPFLLWLRKCLRKAKKFVPASSCQSLESDGSYQKPSYIL

SEQ ID NO: 111 - protein, 385 aa, Homo sapiens
MGCRRTREGPSKAMIFPWKCQSTQRDLWNIFKLWGWTMLCCDFLAHHGTDCWTYHYSEKPMNWQRARRFCRDNYTDLVAIQNKAEIEYLEKTLPFSRSYYWIGIRKIGGIWTWVGTNKSLTEEAENWGDGEPNNKKNKEDCVEIYIKRNKDAGKWNDDACHKLKAALCYTASCQPWSCSGHGECVEIINNYTCNCDVGYYGPQCQFVIQCEPLEAPELGTMDCTHPLGNFSFSSQCAFSCSEGTNLTGIEETTCGPFGNWSSPEPTCQVIQCEPLSAPDLGIMNCSHPLASFSFTSACTFICSEGTELIGKKKTICESSGIWSNPSPICQKLDKSFSMIKEGDYNPLFIPVAVMVTAFSGLAFIIWLARRLKKGKKSKRSMNDPY

SEQ ID NO: 112 - protein, 361 aa, Homo sapiens
MASLLAKDAYLQSLAKKICSHSAPEQQARTRAGKTQGSETAGPPKKKRKKTQKKFRKREEKAAEHKAKSLGEKSPAASGARRPEAAKEEAAWASSSAGNPADGLATEPESVFALDVLRQRLHEKIQEARGQGSAKELSPAALEKRRRRKQERDRKKRKRKELRAKEKARKAEEATEAQEVVEATPEGACTEPREPPGLIFNKVEVSEDEPASKAQRRKEKRQRVKGNLTPLTGRNYRQLLERLQARQSRLDELRGQDEGKAQELEAKMKWTNLLYKAEGVKIRDDERLLQEALKRKEKRRAQRQRRWEKRTAGVVEKMQQRQDRRRQNLRRKKAARAERRLLRARKKGRILPQDLERAGLV

SEQ ID NO: 113 - protein, 237 aa, Homo sapiens
MAGVSACIKYSMFTFNFLFWLCGILILALAIWVRVSNDSQAIFGSEDVGSSSYVAVDILIAVGAIIMILGFLGCCGAIKESRCMLLLFFIGLLLILLLQVATGILGAVFKSKSDRIVNETLYENTKLLSATGESEKQFQEAIIVFQEEFKCCGLVNGAADWGNNFQHYPELCACLDKQRPCQSYNGKQVYKETCISFIKDFLAKNLIIVIGISFGLAVIEILGLVFSMVLYCQIGNK

SEQ ID NO: 114 - protein, 400 aa, Homo sapiens
MTTKNLETKVTVTSSPIRGAGDGMETEEPPKSVEVTSGVQSRKHHSLQSPWKKAVPSESPGVLQLGKMLTEKAMEVKAVRILVPKAAITHDIPNKNTKVKSLGHHKGEFLGQSEGVIEPNKELSEVKNVLEKLKNSERRLLQDKEGLSNQLRVQTEVNRELKKLLVASVGDDLQYHFERLAREKNQLILENEALGRNTAQLSEQLERMSIQCDVWRSKFLASRVMADELTNSRAALQRQNRDAHGAIQDLLSEREQFRQEMIATQKLLEELLVSLQWGREQTYSPSVQPHSTAELALTNHKLAKAVNSHLLGNVGINNQKKIPSTVEFCSTPAEKMAETVLRILDPVTCKESSPDNPFFESSPTTLLATKKNIGRFHPYTRYENITFNCCNHCRGELIAL

SEQ ID NO: 115 - protein, 434 aa, Homo sapiens
MEVRPKESWNHADFVHCEDTESVPGKPSVNADEEVGGPQICRVCGDKATGYHFNVMTCEGCKGFFRRAMKRNARLRCPFRKGACEITRKTRRQCQACRLRKCLESGMKKEMIMSDEAVEERRALIKRKKSERTGTQPLGVQGLTEEQRMMIRELMDAQMKTFDTTFSHFKNFRLPGVLSSGCELPESLQAPSREEAAKWSQVRKDLCSLKVSLQLRGEDGSVWNYKPPADSGGKEIFSLLPHMADMSTYMFKGIISFAKVISYFRDLPIEDQISLLKGAAFELCQLRFNTVFNAETGTWECGRLSYCLEDTAGGFQQLLLEPMLKFHYMLKKLQLHEEEYVLMQAISLFSPDRPGVLQHRVVDQLQEQFAITLKSYIECNRPQPAHRFLFLKIMAMLTELRSINAQHTQRLLRIQDIHPFATPLMQELFGITGS

SEQ ID NO: 116 - protein, 397 aa, Homo sapiens
MEVRPKESWNHADFVHCEDTESVPGKPSVNADEEVGGPQICRVCGDKATGYHFNVMTCEGCKGFFRRAMKRNARLRCPFRKGACEITRKTRRQCQACRLRKCLESGMKKEMIMSDEAVEERRALIKRKKSERTGTQPLGVQGLTEEQRMMIRELMDAQMKTFDTTFSHFKNFRVSLQLRGEDGSVWNYKPPADSGGKEIFSLLPHMADMSTYMFKGIISFAKVISYFRDLPIEDQISLLKGAAFELCQLRFNTVFNAETGTWECGRLSYCLEDTAGGFQQLLLEPMLKFHYMLKKLQLHEEEYVLMQAISLFSPDRPGVLQHRVVDQLQEQFAITLKSYIECNRPQPAHRFLFLKIMAMLTELRSINAQHTQRLLRIQDIHPFATPLMQELFGITGS

SEQ ID NO: 117 - protein, 230 aa, Homo sapiens
MKNPMLEVVSLLLEKLLLISNFTLFSSGAAGEDKGRNSFYETSSFHRGDVLEVPRTHLTHYGIYLGDNRVAHMMPDILLALTDDMGRTQKVVSNKRLILGVIVKVASIRVDTVEDFAYGANILVNHLDESLQKKALLNEEVARRAEKLLGFTPYSLLWNNCEHFVTYCRYGTPISPQSDKFCETVKIIIRDQRSVLASAVLGLASIVCTGLVSYTTLPAIFIPFFLWMAG

SEQ ID NO: 118 - protein, 536 aa, Homo sapiens
MAEHAPRRCCLGWDFSTQQVKVVAVDAELNVFYEESVHFDRDLPEFGTQGGVHVHKDGLTVTSPVLMWVQALDIILEKMKASGFDFSQVLALSGAGQQHGSIYWKAGAQQALTSLSPDLRLHQQLQDCFSISDCPVWMDSSTTAQCRQLEAAVGGAQALSCLTGSRAYERFTGNQIAKIYQQNPEAYSHTERISLVSSFAASLFLGSYSPIDYSDGSGMNLLQIQDKVWSQACLGACAPHLEEKLSPPVPSCSVVGAISSYYVQRYGFPPGCKVVAFTGDNPASLAGMRLEEGDIAVSLGTSDTLFLWLQEPMPALEGHIFCNPVDSQHYMALLCFKNGSLMREKIRNESVSRSWSDFSKALQSTEMGNGGNLGFYFDVMEITPEIIGRHRFNTENHKVAAFPGDVEVRALIEGQFMAKRIHAEGLGYRVMSKTKILATGGASHNREILQVLADVFDAPVYVIDTANSACVGSAYRAFHGLAGGTDVPFSEVVKLAPNPRLAATPSPGASQVYEALLPQYAKLEQRILSQTRGPPE

SEQ ID NO: 119 - protein, 479 aa, Homo sapiens
MSDVTIVKEGWVQKRGEYIKNWRPRYFLLKTDGSFIGYKEKPQDVDLPYPLNNFSVAKCQLMKTERPKPNTFIIRCLQWTTVIERTFHVDTPEEREEWTEAIQAVADRLQRQEEERMNCSPTSQIDNIGEEEMDASTTHHKRKTMNDFDYLKLLGKGTFGKVILVREKASGKYYAMKILKKEVIIAKDEVAHTLTESRVLKNTRHPFLTSLKYSFQTKDRLCFVMEYVNGGELFFHLSRERVFSEDRTRFYGAEIVSALDYLHSGKIVYRDLKLENLMLDKDGHIKITDFGLCKEGITDAATMKTFCGTPEYLAPEVLEDNDYGRAVDWWGLGVVMYEMMCGRLPFYNQDHEKLFELILMEDIKFPRTLSSDAKSLLSGLLIKDPNKRLGGGPDDAKEIMRHSFFSGVNWQDVYDKKLVPPFKPQVTSETDTRYFDEEFTAQTITITPPEKYDEDGMDCMDNERRPHFPQFSYSASGRE

SEQ ID NO: 120 - protein, 238 aa, Homo sapiens
MLTTLLPILLLSGWAFCSQDASDGLQRLHMLQISYFRDPYHVWYQGNASLGGHLTHVLEGPDTNTTIIQLQPLQEPESWARTQSGLQSYLLQFHGLVRLVHQERTLAFPLTIRCFLGCELPPEGSRAHVFFEVAVNGSSFVSFRPERALWQADTQVTSGVVTFTLQQLNAYNRTRYELREFLEDTCVQYVQKHISAENTKGSQTSRSYTSLVLGVLVGSFIIAGVAVGIFLCTGGRRC

SEQ ID NO: 121 - protein, 619 aa, Homo sapiens
MDDQQALNSIMQDLAVLHKASRPALSLQETRKAKSSSPKKQNDVRVKFEHRGEKRILQFPRPVKLEDLRSKAKIAFGQSMDLHYTNNELVIPLTTQDDLDKAVELLDRSIHMKSLKILLVINGSTQATNLEPLPSLEDLDNTVFGAERKKRLSIIGPTSRDRSSPPPGYIPDELHQVARNGSFTSINSEGEFIPESMDQMLDPLSLSSPENSGSGSCPSLDSPLDGESYPKSRMPRAQSYPDNHQEFSDYDNPIFEKFGKGGTYPRRYHVSYHHQEYNDGRKTFPRARRTQGTSLRSPVSFSPTDHSLSTSSGSSIFTPEYDDSRIRRRGSDIDNPTLTVMDISPPSRSPRAPTNWRLGKLLGQGAFGRVYLCYDVDTGRELAVKQVQFDPDSPETSKEVNALECEIQLLKNLLHERIVQYYGCLRDPQEKTLSIFMEYMPGGSIKDQLKAYGALTENVTRKYTRQILEGVHYLHSNMIVHRDIKGANILRDSTGNVKLGDFGASKRLQTICLSGTGMKSVTGTPYWMSPEVISGEGYGRKADIWSVACTVVEMLTEKPPWAEFEAMAAIFKIATQPTNPKLPPHVSDYTRDFLKRIFVEAKLRPSADELLRHMFVHYH

SEQ ID NO: 122 - protein, 645 aa, Homo sapiens
MPRSRGGRAAPGPPPPPPPPGQAPRWSRWRVPGRLLLLLLPALCCLPGAARAAAAAAGAGNRAAVAVAVARADEAEAPFAGQNWLKSYGYLLPYDSRASALHSAKALQSAVSTMQQFYGIPVTGVLDQTTIEWMKKPRCGVPDHPHLSRRRRNKRYALTGQKWRQKHITYSIHNYTPKVGELDTRKAIRQAFDVWQKVTPLTFEEVPYHEIKSDRKEADIMIFFASGFHGDSSPFDGEGGFLAHAYFPGPGIGGDTHFDSDEPWTLGNANHDGNDLFLVAVHELGHALGLEHSSDPSAIMAPFYQYMETHNFKLPQDDLQGIQKIYGPPAEPLEPTRPLPTLPVRRIHSPSERKHERQPRPPRPPLGDRPSTPGTKPNICDGNFNTVALFRGEMFVFKDRWFWRLRNNRVQEGYPMQIEQFWKGLPARIDAAYERADGRFVFFKGDKYWVFKEVTVEPGYPHSLGELGSCLPREGIDTALRWEPVGKTYFFKGERYWRYSEERRATDPGYPKPITVWKGIPQAPQGAFISKEGYYTYFYKGRDYWKFDNQKLSVEPGYPRNILRDWMGCNQKEVERRKERRLPQDDVDIMVTINDVPGSVNAVAVVIPCILSLCILVLVYTIFQFKNKTGPQPVTYYKRPVQEWV

SEQ ID NO: 123 - protein, 1427 aa, Homo sapiens
MHQRHPRARCPPLCVAGILACGFLLGCWGPSHFQQSCLQALEPQAVSSYLSPGAPLKGRPPSPGFQRQRQRQRRAAGGILHLELLVAVGPDVFQAHQEDTERYVLTNLNIGAELLRDPSLGAQFRVHLVKMVILTEPEGAPNITANLTSSLLSVCGWSQTINPEDDTDPGHADLVLYITRFDLELPDGNRQVRGVTQLGGACSPTWSCLITEDTGFDLGVTIAHEIGHSFGLEHDGAPGSGCGPSGHVMASDGAAPRAGLAWSPCSRRQLLSLLSAGRARCVWDPPRPQPGSAGHPPDAQPGLYYSANEQCRVAFGPKAVACTFAREHLDMCQALSCHTDPLDQSSCSRLLVPLLDGTECGVEKWCSKGRCRSLVELTPIAAVHGRWSSWGPRSPCSRSCGGGVVTRRRQCNNPRPAFGGRACVGADLQAEMCNTQACEKTQLEFMSQQCARTDGQPLRSSPGGASFYHWGAAVPHSQGDALCRHMCRAIGESFIMKRGDSFLDGTRCMPSGPREDGTLSLCVSGSCRTFGCDGRMDSQQVWDRCQVCGGDNSTCSPRKGSFTAGRAREYVTFLTVTPNLTSVYIANHRPLFTHLAVRIGGRYVVAGKMSISPNTTYPSLLEDGRVEYRVALTEDRLPRLEEIRIWGPLQEDADIQVYRRYGEEYGNLTRPDITFTYFQPKPRQAWVWAAVRGPCSVSCGAGLRWVNYSCLDQARKELVETVQCQGSQQPPAWPEACVLEPCPPYWAVGDFGPCSASCGGGLRERPVRCVEAQGSLLKTLPPARCRAGAQQPAVALETCNPQPCPARWEVSEPSSCTSAGGAGLALENETCVPGADGLEAPVTEGPGSVDEKLPAPEPCVGMSCPPGWGHLDATSAGEKAPSPWGSIRTGAQAAHVWTPAAGSCSVSCGRGLMELRFLCMDSALRVPVQEELCGLASKPGSRREVCQAVPCPARWQYKLAACSVSCGRGVVRRILYCARAHGEDDGEEILLDTQCQGLPRPEPQEACSLEPCPPRWKVMSLGPCSASCGLGTARRSVACVQLDQGQDVEVDEAACAALVRPEASVPCLIADCTYRWHVGTWMECSVSCGDGIQRRRDTCLGPQAQAPVPADFCQHLPKPVTVRGCWAGPCVGQGTPSLVPHEEAAAPGRTTATPAGASLEWSQARGLLFSPAPQPRRLLPGPQENSVQSSACGRQHLEPTGTIDMRGPGQADCAVAIGRPLGEVVTLRVLESSLNCSAGDMLLLWGRLTWRKMCRKLLDMTFSSKTNTLVVRQRCGRPGGGVLLRYGSQLAPETFYRECDMQLFGPWGEIVSPSLSPATSNAGGCRLFINVAPHARIAIHALATNMGAGTEGANASYILIRDTHSLRTTAFHGQQVLYWESESSQAEMEFSEGFLKAQASLRGQYWTLQSWVPEMQDPQSWKGKEGT

SEQ ID NO: 124 - protein, 1340 aa, Homo sapiens
MHQRHPRARCPPLCVAGILACGFLLGCWGPSHFQQSCLQALEPQAVSSYLSPGAPLKGRPPSPGFQRQRQRQRRAAGGILHLELLVAVGPDVFQAHQEDTERYVLTNLNIGAELLRDPSLGAQFRVHLVKMVILTEPEGAPNITANLTSSLLSVCGWSQTINPEDDTDPGHADLVLYITRFDLELPDGNRQVRGVTQLGGACSPTWSCLITEDTGFDLGVTIAHEIGHSFGLEHDGAPGSGCGPSGHVMASDGAAPRAGLAWSPCSRRQLLSLLSANEQCRVAFGPKAVACTFAREHLDMCQALSCHTDPLDQSSCSRLLVPLLDGTECGVEKWCSKGRCRSLVELTPIAAVHGRWSSWGPRSPCSRSCGGGVVTRRRQCNNPRPAFGGRACVGADLQAEMCNTQACEKTQLEFMSQQCARTDGQPLRSSPGGASFYHWGAAVPHSQGDALCRHMCRAIGESFIMKRGDSFLDGTRCMPSGPREDGTLSLCVSGSCRTFGCDGRMDSQQVWDRCQVCGGDNSTCSPRKGSFTAGRAREYVTFLTVTPNLTSVYIANHRPLFTHLAVRIGGRYVVAGKMSISPNTTYPSLLEDGRVEYRVALTEDRLPRLEEIRIWGPLQEDADIQVYRRYGEEYGNLTRPDITFTYFQPKPRQAWVWAAVRGPCSVSCGAGLRWVNYSCLDQARKELVETVQCQGSQQPPAWPEACVLEPCPPYWAVGDFGPCSASCGGGLRERPVRCVEAQGSLLKTLPPARCRAGAQQPAVALETCNPQPCPARWEVSEPSSCTSAGGAGLALENETCVPGADGLEAPVTEGPGSVDEKLPAPEPCVGMSCPPGWGHLDATSAGEKAPSPWGSIRTGAQAAHVWTPAAGSCSVSCGRGLMELRFLCMDSALRVPVQEELCGLASKPGSRREVCQAVPCPARWQYKLAACSVSCGRGVVRRILYCARAHGEDDGEEILLDTQCQGLPRPEPQEACSLEPCPPRWKVMSLGPCSASCGLGTARRSVACVQLDQGQDVEVDEAACAALVRPEASVPCLIADCTYRWHVGTWMECSVSCGDGIQRRRDTCLGPQAQAPVPADFCQHLPKPVTVRGCWAGPCVGQGACGRQHLEPTGTIDMRGPGQADCAVAIGRPLGEVVTLRVLESSLNCSAGDMLLLWGRLTWRKMCRKLLDMTFSSKTNTLVVRQRCGRPGGGVLLRYGSQLAPETFYRECDMQLFGPWGEIVSPSLSPATSNAGGCRLFINVAPHARIAIHALATNMGAGTEGANASYILIRDTHSLRTTAFHGQQVLYWESESSQAEMEFSEGFLKAQASLRGQYWTLQSWVPEMQDPQSWKGKEGT

SEQ ID NO: 125 - protein, 1371 aa, Homo sapiens
MHQRHPRARCPPLCVAGILACGFLLGCWGPSHFQQSCLQALEPQAVSSYLSPGAPLKGRPPSPGFQRQRQRQRRAAGGILHLELLVAVGPDVFQAHQEDTERYVLTNLNIGAELLRDPSLGAQFRVHLVKMVILTEPEGAPNITANLTSSLLSVCGWSQTINPEDDTDPGHADLVLYITRFDLELPDGNRQVRGVTQLGGACSPTWSCLITEDTGFDLGVTIAHEIGHSFGLEHDGAPGSGCGPSGHVMASDGAAPRAGLAWSPCSRRQLLSLLSAGRARCVWDPPRPQPGSAGHPPDAQPGLYYSANEQCRVAFGPKAVACTFAREHLDMCQALSCHTDPLDQSSCSRLLVPLLDGTECGVEKWCSKGRCRSLVELTPIAAVHGRWSSWGPRSPCSRSCGGGVVTRRRQCNNPRPAFGGRACVGADLQAEMCNTQACEKTQLEFMSQQCARTDGQPLRSSPGGASFYHWGAAVPHSQGDALCRHMCRAIGESFIMKRGDSFLDGTRCMPSGPREDGTLSLCVSGSCRTFGCDGRMDSQQVWDRCQVCGGDNSTCSPRKGSFTAGRAREYVTFLTVTPNLTSVYIANHRPLFTHLAVRIGGRYVVAGKMSISPNTTYPSLLEDGRVEYRVALTEDRLPRLEEIRIWGPLQEDADIQVYRRYGEEYGNLTRPDITFTYFQPKPRQAWVWAAVRGPCSVSCGAGLRWVNYSCLDQARKELVETVQCQGSQQPPAWPEACVLEPCPPYWAVGDFGPCSASCGGGLRERPVRCVEAQGSLLKTLPPARCRAGAQQPAVALETCNPQPCPARWEVSEPSSCTSAGGAGLALENETCVPGADGLEAPVTEGPGSVDEKLPAPEPCVGMSCPPGWGHLDATSAGEKAPSPWGSIRTGAQAAHVWTPAAGSCSVSCGRGLMELRFLCMDSALRVPVQEELCGLASKPGSRREVCQAVPCPARWQYKLAACSVSCGRGVVRRILYCARAHGEDDGEEILLDTQCQGLPRPEPQEACSLEPCPPRWKVMSLGPCSASCGLGTARRSVACVQLDQGQDVEVDEAACAALVRPEASVPCLIADCTYRWHVGTWMECSVSCGDGIQRRRDTCLGPQAQAPVPADFCQHLPKPVTVRGCWAGPCVGQGACGRQHLEPTGTIDMRGPGQADCAVAIGRPLGEVVTLRVLESSLNCSAGDMLLLWGRLTWRKMCRKLLDMTFSSKTNTLVVRQRCGRPGGGVLLRYGSQLAPETFYRECDMQLFGPWGEIVSPSLSPATSNAGGCRLFINVAPHARIAIHALATNMGAGTEGANASYILIRDTHSLRTTAFHGQQVLYWESESSQAEMEFSEGFLKAQASLRGQYWTLQSWVPEMQDPQSWKGKEGT

SEQ ID NO: 126 - protein, 1174 aa, Homo sapiens [sequence omitted]

SEQ ID NO: 127 - protein, 792 aa, Homo sapiens
MQGEDARYLKRKVKGGNIDVHPSEKALIVHYEVEATILGEMGDPMLGERKECQKIIRLKSLNANTDITSLARKVVEECKLIHPSKLNEVEQLLYYLQNRRDSLSGKEKKEKSSKPKDPPPFEGMEIDEVANINDMDEYIELLYEDIPDKVRGSALILQLARNPDNLEELLLNETALGALARVLREDWKQSVELATNIIYIFFCFSSFSQFHGLITHYKIGALCMNIIDHELKRHELWQEELSKKKKAVDEDPENQTLRKDYEKTFKKYQGLVVKQEQLLRVALYLLLNLAEDTRTELKMRNKNIVHMLVKALDRDNFELLILVVSFLKKLSIFMENKNDMVEMDIVEKLVKMIPCEHEDLLNITLRLLLNLSFDTGLRNKMVQVGLLPKLTALLGNDNYKQIAMCVLYHISMDDRFKSMFAYTDCIPQLMKMLFECSDERIDLELISFCINLAANKRNVQLICEGNGLKMLMKRALKFKDPLLMKMIRNISQHDGPTKNLFIDYVGDLAAQISNDEEEEFVIECLGTLANLTIPDLDWELVLKEYKLVPYLKDKLKPGAAEDDLVLEVVIMIGTVSMDDSCAALLAKSGIIPALIELLNAQQEDDEFVCQIIYVFYQMVFHQATRDVIIKETQAPAYLIDLMHDKNNEIRKVCDNTLDIIAEYDEEWAKKIQSEKFRWHNSQWLEMVESRQMDESEQYLYGDDRIEPYIHEGDILERPDLFYNSDGLIASEGAISPDFFNDYHLQNGDVVGQHSFPGSLGMDGFGQPVGILGRPATAYGFRPDEPYYYGYGS

SEQ ID NO: 128 - protein, 670 aa, Homo sapiens
MGEPAGVAGTMESPFSPGLFHRLDEDWDSALFAELGYFTDTDELQLEAANETYENNFDNLDFDLDLMPWESDIWDINNQICTVKDIKAEPQPLSPASSSYSVSSPRSVDSYSSTQHVPEELDLSSSSQMSPLSLYGENSNSLSSAEPLKEDKPVTGPRNKTENGLTPKKKIQVNSKPSIQPKPLLLPAAPKTQTNSSVPAKTIIIQTVPTLMPLAKQQPIISLQPAPTKGQTVLLSQPTVVQLQAPGVLPSAQPVLAVAGGVTQLPNHVVNVVPAPSANSPVNGKLSVTKPVLQSTMRNVGSDIAVLRRQQRMIKNRESACQSRKKKKEYMLGLEARLKAALSENEQLKKENGTLKRQLDEVVSENQRLKVPSPKRRVVCVMIVLAFIILNYGPMSMLEQDSRRMNPSVSPANQRRHLLGFSAKEAQDTSDGIIQKNSYRYDHSVSNDKALMVLTEEPLLYIPPPPCQPLINTTESLRLNHELRGWVHRHEVERTKSRRMTNNQQKTRILQGALEQGSNSQLMAVQYTETTSSISRNSGSELQVYYASPRSYQDFFEAIRRRGDTFYVVSFRRDHLLLPATTHNKTTRPKMSIVLPAININENVINGQDYEVMMQIDCQVMDTRILHIKSSSVPPYLRDQQRNQTNTFFGSPPAATEATHVVSTIPESLQ

SEQ ID NO: 129 - protein, 797 aa, Homo sapiens
MAAAPVAAGSGAGRGRRSAATVAAWGGWGGRPRPGNILLQLRQGQLTGRGLVRAVQFTETFLTERDKQSKWSGIPQLLLKLHTTSHLHSDFVECQNILKEISPLLSMEAMAFVTEERKLTQETTYPNTYIFDLFGGVDLLVEILMRPTISIRGQKLKISDEMSKDCLSILYNTCVCTEGVTKRLAEKNDFVIFLFTLMTSKKTFLQTATLIEDILGVKKEMIRLDEVPNLSSLVSNFDQQQLANFCRILAVTISEMDTGNDDKHTLLAKNAQQKKSLSLGPSAAEINQAALLSIPGFVERLCKLATRKVSESTGTASFLQELEEWYTWLDNALVLDALMRVANEESEHNQASIVFPPPGASEENGLPHTSARTQLPQSMKIMHEIMYKLEVLYVLCVLLMGRQRNQVHRMIAEFKLIPGLNNLFDKLIWRKHSASALVLHGHNQNCDCSPDITLKIQFLRLLQSFSDHHENKYLLLNNQELNELSAISLKANIPEVEAVLNTDRSLVCDGKRGLLTRLLQVMKKEPAESSFRFWQARAVESFLRGTTSYADQMFLLKRGLLEHILYCIVDSECKSRDVLQSYFDLLGELMKFNVDAFKRFNKYINTDAKFQVFLKQINSSLVDSNMLVRCVTLSLDRFENQVDMKVAEVLSECRLLAYISQVPTQMSFLFRLINIIHVQTLTQENVSCLNTSLVILMLARRKERLPLYLRLLQRMEHSKKYPGFLLNNFHNLLRFWQQHYLHKDKDSTCLENSSCISFSYWKETVSILLNPDRQSPSALVSYIEEPYMDIDRDFTEE

SEQ ID NO: 130 - protein, 789 aa, Homo sapiens
MAAAPVAAGSGAGRGRRSAATVAAWGGWGGRPRPGNILLQLRQGQLTGRGLVRAVQFTETFLTERDKQSKWSGIPQLLLKLHTTSHLHSDFVECQNILKEISPLLSMEAMAFVTEERKLTQETTYPNTYIFDLFGGVDLLVEILMRPTISIRGQKLKISDEMSKDCLSILYNTCVCTEGVTKRLAEKNDFVIFLFTLMTSKKTFLQTATLIEDILGVKKEMIRLDEVPNLSSLVSNFDQQQLANFCRILAVTISEMDTGNDDKHTLLAKNAQQKKSLSLGPSAAEINQAALLSIPGFVERLCKLATRKVSESTGTASFLQELEEWYTWLDNALVLDALMRVANEESEHNQGASEENGLPHTSARTQLPQSMKIMHEIMYKLEVLYVLCVLLMGRQRNQVHRMIAEFKLIPGLNNLFDKLIWRKHSASALVLHGHNQNCDCSPDITLKIQFLRLLQSFSDHHENKYLLLNNQELNELSAISLKANIPEVEAVLNTDRSLVCDGKRGLLTRLLQVMKKEPAESSFRFWQARAVESFLRGTTSYADQMFLLKRGLLEHILYCIVDSECKSRDVLQSYFDLLGELMKFNVDAFKRFNKYINTDAKFQVFLKQINSSLVDSNMLVRCVTLSLDRFENQVDMKVAEVLSECRLLAYISQVPTQMSFLFRLINIIHVQTLTQENVSCLNTSLVILMLARRKERLPLYLRLLQRMEHSKKYPGFLLNNFHNLLRFWQQHYLHKDKDSTCLENSSCISFSYWKETVSILLNPDRQSPSALVSYIEEPYMDIDRDFTEE

SEQ ID NO: 131 - protein, 170 aa, Homo sapiens
MKTLFLGVTLGLAAALSFTLEEEDITGTWYVKAMVVDKDFPEDRRPRKVSPVKVTALGGGKLEATFTFMREDRCIQKKILMRKTEEPGKYSAYGGRKLMYLQELPRRDHYIFYCKDQHHGGLLHMGKLVGRNSDTNREALEEFKKLVQRKGLSEEDIFTPLQTGSCVPEH

SEQ ID NO: 132 - protein, 620 aa, Homo sapiens
MSPSPTALFCLGLCLGRVPAQSGPLPKPSLQALPSSLVPLEKPVTLRCQGPPGVDLYRLEKLSSSRYQDQAVLFIPAMKRSLAGRYRCSYQNGSLWSLPSDQLELVATGVFAKPSLSAQPGPAVSSGGDVTLQCQTRYGFDQFALYKEGDPAPYKNPERWYRASFPIITVTAAHSGTYRCYSFSSRDPYLWSAPSDPLELVVTGTSVTPSRLPTEPPSPVAEFSEATAELTVSFTNEVFTTETSRSITASPKESDSPAGESCPPVLHQGQPGPDMPRGCDPNNPGGVSGRGLAQPEEAPAAQGQGCAEAASAPPAPPADPEITRGSGWRPTGCSQPRVMFMTAEPQARSYPREGSWHGRRLKDWRVWSVEAGGQRLQLWKRGHAASSWCSIREPFGQCLSVCLPLCLRAPSIWDGRNLWRPHPPPCTLWMTWYPGWTTYWPLSSTSLIWAPDGSLRFPALRVDSVPSSVQNPPVLPFGPLCSCLVFPRNSHPHSISHCGLTNLLSSLRTGLAGSLGMSFIFLSVKLARCPLPFTLENKISLCNMVKPHLYQQNKKTQKLARCGGASLYSQQLRGLRWENGLSLGGRGCSELRSHHCTLARVTKPDFVSKNTGMNMSITLI

SEQ ID NO: 133 - protein, 339 aa, Homo sapiens
MSPSPTALFCLGLCLGRVPAQSGPLPKPSLQALPSSLVPLEKPVTLRCQGPPGVDLYRLEKLSSSRYQDQAVLFIPAMKRSLAGRYRCSYQNGSLWSLPSDQLELVATGVFAKPSLSAQPGPAVSSGGDVTLQCQTRYGFDQFALYKEGDPAPYKNPERWYRASFPIITVTAAHSGTYRCYSFSSRDPYLWSAPSDPLELVVTGTSVTPSRLPTEPPSPVAEFSEATAELTVSFTNEVFTTETSRSITASPKESDSPAGPARQYYTKGNLVRICLGAVILIILAGFLAEDWHSRRKRLRHRGRAVQRPLPPLPPLPQTRKSHGGQDGGRQDVHSRGLCS

SEQ ID NO: 134 - protein, 227 aa, Homo sapiens
MAPYHIRKYQESDRKSVVGLLSRGMAEHAPATFRRLLKLPRTLILLLGGALALLLVSGSWILALVFSLSLLPALWFLAKKPWTRYVDIALRTDMSDITKSYLSECGSCFWVGESEEKVVGTVGALPVDDPTLREKRLQLFHLSVDNEHRGQGIAKALVRTVLQFARDQGYSEVVLDTSNIQLSAMGLYQSLGFKKTGQSFFHVWARLVDLHTVHFIYHLPSAQAGRL

SEQ ID NO: 135 - protein, 1369 aa, Homo sapiens
MSPCGRKMGEGRQQRRAPVGKLLLLPGRRDTPHGRSGSSGARTQRSLLWLLVHVWLWAASGSSAQLFNLTLSVDEGLPPDTLVGDIRAGLPAAQQQEGSGFFLSEDSDDSPLLDDFHVHPDTGIIRTARRLDRERRDHYSFVAATLLGAVVQVEIRVNDVNDHSPRFPLDSLQLDVSELSPPGTAFRLPVAHDPDAGLFSTQGYTLVQPSDLPKDPAGPFFQLRYRTPGPLPSPLLPGSSSPLEPLDLVLLRRLDREEAAAHRLQIEAWDGGRPRRTGLLSVELRVLDENDNPPVFEQDEYRAAVREDAQPGAEVCRVRATDRDLGPNGFVRYSVRARQVPGAGSGGGALGDAAYFAVEELSGVVRVWRPLDREAQAWHQLVVEARDGGAEPEVATVRVSIAVLDVNDNRPAIHVLFLTEGGVARVSEGARPGDYVARVSVSDADGDWEKEDEATGELGVGLGDGSISLSLEGGEGDFALLPGGPPGVFFLCVEGPLDRESRDLYELLLVATDAGSPPLSTEETLLLRVADLNDQPPLFSQQHYKASVSEAAAPGTVVMWVSASDADEAGSDHAWLRYTVVQLSAPCNLGSLQSKMVHTAECGPSFAIDSESGAISTIRTLDREVQEAVELKVVAQDLGEPPLSATCLVSITVDDVNDNEPIFWRQVYNATIAEHAPVGHCFLQVTASDADSGLYGFIEYSLYDGFLSYEAPQAFRIDPHDGQICVSQDIDRERDPATYDLLVEAKDGGGLSAQAFVRVDLEDVNDNHPVFNPSTYVTSISDETQPGTEIINVLATDQDSGIYGTVAYELIPGNVSSLFTIDSTTGIIYLTLPLSHLESTTLSLMVSAQDGGGLTAVINADVTIHIFQTTLAPAEFERPKYTFLVYEDVPEDSPIGTVKAREPLNSSEPIFYRISSGDLGGKFSIHPRLGTIRTRKPLDHETQPVVVLTVQAQLGSAPACSSTEVNITVMDVNDNHPAFLRTSDEIRISQTTPPGTALYLARAEDRDSGRNGLIRYSIASPQPGVFAIDRALGVLFLNGSLGAGEQRELTLTLRAEDQGVHPQAALLVLTVVIEKREHSPSWTFEHLVYQVEVSESLSPMTQMLQTQAHPLGPQRAASPLRYSLEPSVDSAMFGIRPYTGWIYLRRQFDYESTQTYNFRVFAWIPEDGFLQNVSTTVIVRVWDENDNSPTFLHDVLFLKVEESPVPQGVIGKITAIDMDSGKNGQLLYFLLSDGKFFKMNPNTGELINWVALDREHRGHHEMTVLVTDRGSPPRNATMAVYVSVTDINDNRPFFPQCLPGKELHVKVLEGQPVNMLVTTVFAKDPDEGNNAEVTYSVSSARPMPLKGKTAFGKQSCKKQTNKQTNKILT

SEQ ID NO: 136 - protein, 709 aa, Homo sapiens
MSPCGRKMGEGRQQRRAPVGKLLLLPGRRDTPHGRSGSSGARTQRSLLWLLVHVWLWAASGSSAQLFNLTLSVDEGLPPDTLVGDIRAGLPAAQQQEGSGFFLSEDSDDSPLLDDFHVHPDTGIIRTARRLDRERRDHYSFVAATLLGAVVQVEIRVNDVNDHSPRFPLDSLQLDVSELSPPGTAFRLPVAHDPDAGLFSTQGYTLVQPSDLPKDPAGPFFQLRYRTPGPLPSPLLPGSSSPLEPLDLVLLRRLDREEAAAHRLQIEAWDGGRPRRTGLLSVELRVLDENDNPPVFEQDEYRAAVREDAQPGAEVCRVRATDRDLGPNGFVRYSVRARQVPGAGSGGGALGDAAYFAVEELSGVVRVWRPLDREAQAWHQLVVEARDGGAEPEVATVRVSIAVLDVNDNRPAIHVLFLTEGGVARVSEGARPGDYVARVSVSDADGDWEKEDEATGELGVGLGDGSISLSLEGGEGDFALLPGGPPGVFFLCVEGPLDRESRDLYELLLVATDAGSPPLSTEETLLLRVADLNDQPPLFSQQHYKASVSEAAAPGTVVMWVSASDADEAGSDHAWLRYTVVQLSAPCNLGSLQSKMVHTAECGPSFAIDSESGAISTIRTLDREVQEAVELKVVAQDLGEPPLSATCLVSITVDDVNDNEPIFWRQVYNATIAEHAPVGHCFLQLISAQVAFVKIKQKQKEIQEKQNLA

SEQ ID NO: 137 - protein, 375 aa, Homo sapiens
MFPRSGPSNDEVKSRGMKFAEEQLLKHGWTQGKGLGRKENGITQALRVTLKQDTHGVGHDPAKEFTNHWWNELFNKTAANLVVETGQDGVQIRSLSKETTRYNHPKPNLLYQKFVKMATLTSGGEKPNKDLESCSDDDNQGSKSPKILTDEMLLQACEGRTAHKAARLGITMKAKLARLEAQEQAFLARLKGQDPGAPQLQSESKPPKKKKKKRRQKEEEEATASERNDADEKHPEHAEQNIRKSKKKKRRHQEGKVSDEREGTTKGNEKEDAAGTSGLGELNSREQTNQSLRKGKKKKRWHHEEEKMGVLEEGGKGKEAAGSVRTEEVESRAYADPCSRRKKRQQQEEEDLNLEDRGEETFRWWNQGSREQSMQ

SEQ ID NO: 138 - protein, 370 aa, Homo sapiens
MNVTPEVKSRGMKFAEEQLLKHGWTQGKGLGRKENGITQALRVTLKQDTHGVGHDPAKEFTNHWWNELFNKTAANLVVETGQDGVQIRSLSKETTRYNHPKPNLLYQKFVKMATLTSGGEKPNKDLESCSDDDNQGSKSPKILTDEMLLQACEGRTAHKAARLGITMKAKLARLEAQEQAFLARLKGQDPGAPQLQSESKPPKKKKKKRRQKEEEEATASERNDADEKHPEHAEQNIRKSKKKKRRHQEGKVSDEREGTTKGNEKEDAAGTSGLGELNSREQTNQSLRKGKKKKRWHHEEEKMGVLEEGGKGKEAAGSVRTEEVESRAYADPCSRRKKRQQQEEEDLNLEDRGEETFRWWNQGSREQSMQ

SEQ ID NO: 139 - protein, 664 aa, Homo sapiens
MERPEEGKQSPPPQPWGRLLRLGAEEGEPHVLLRKREWTIGRRRGCDLSFPSNKLVSGDHCRIVVDEKSGQVTLEDTSTSGTVINKLKVVKKQTCPLQTGDVIYLVYRKNEPEHNVAYLYESLSEKQGMTQESFEANKENVFHGTKDTSGAGAGRGADPRVPPSSPATQVCFEEPQPSTSTSDLFPTASASSTEPSPAGRERSSSCGSGGGGISPKGSGPSVASDEVSSFASALPDRKTASFSSLEPQDQEDLEPVKKKMRGDGDLDLNGQLLVAQPRRNAQTVHEDVRAAAGKPDKMEETLTCIICQDLLHDCVSLQPCMHTFCAACYSGWMERSSLCPTCRCPVERICKNHILNNLVEAYLIQHPDKSRSEEDVQSMDARNKITQDMLQPKVRRSFSDEEGSSEDLLELSDVDSESSDISQPYVVCRQCPEYRRQAAQPPHCPAPEGEPGAPQALGDAPSTSVSLTTAVQDYVCPLQGSHALCTCCFQPMPDRRAEREQDPRVAPQQCAVCLQPFCHLYWGCTRTGCYGCLAPFCELNLGDKCLDGVLNNNSYESDILKNYLATRGLTWKNMLTESLVALQRGVFLLSDYRVTGDTVLCYCCGLRSFRELTYQYRQNIPASELPVAVTSRPDCYWGRNCRTQVKAHHAMKFNHICEQTRFKN

SEQ ID NO: 140 - protein, 663 aa, Homo sapiens
MERPEEGKQSPPPQPWGRLLRLGAEEGEPHVLLRKREWTIGRRRGCDLSFPSNKLVSGDHCRIVVDEKSGQVTLEDTSTSGTVINKLKVVKKQTCPLQTGDVIYLVYRKNEPEHNVAYLYESLSEKQGMTQESFEANKENVFHGTKDTSGAGAGRGADPRVPPSSPATQVCFEEPQPSTSTSDLFPTASASSTEPSPAGRERSSSCGSGGGGISPKGSGPSVASDEVSSFASALPDRKTASFSSLEPQDQEDLEPVKKKMRGDGDLDLNGQLLVAQPRRNAQTVHEDVRAAAGKPDKMEETLTCIICQDLLHDCVSLQPCMHTFCAACYSGWMERSSLCPTCRCPVERICKNHILNNLVEAYLIQHPDKSRSEEDVQSMDARNKITQDMLQPKVRRSFSDEEGSSEDLLELSDVDSESSDISQPYVVCRQCPEYRRQAAQPPHCPAPEGEPGAPQALGDAPSTSVSLTTVQDYVCPLQGSHALCTCCFQPMPDRRAEREQDPRVAPQQCAVCLQPFCHLYWGCTRTGCYGCLAPFCELNLGDKCLDGVLNNNSYESDILKNYLATRGLTWKNMLTESLVALQRGVFLLSDYRVTGDTVLCYCCGLRSFRELTYQYRQNIPASELPVAVTSRPDCYWGRNCRTQVKAHHAMKFNHICEQTRFKN

SEQ ID NO: 141 - protein, 652 aa, Homo sapiens
MERPEEGKQSPPPQPWGRLLRLGAEEGEPHVLLRKREWTIGRRRGCDLSFPSNKLVSGDHCRIVVDEKSGQVTLEDTSTSGTVINKLKVVKKQTCPLQTGDVIYLVYRKNEPEHNVAYLYESLSEKQGMTQESFDTSGAGAGRGADPRVPPSSPATQVCFEEPQPSTSTSDLFPTASASSTEPSPAGRERSSSCGSGGGGISPKGSGPSVASDEVSSFASALPDRKTASFSSLEPQDQEDLEPVKKKMRGDGDLDLNGQLLVAQPRRNAQTVHEDVRAAAGKPDKMEETLTCIICQDLLHDCVSLQPCMHTFCAACYSGWMERSSLCPTCRCPVERICKNHILNNLVEAYLIQHPDKSRSEEDVQSMDARNKITQDMLQPKVRRSFSDEEGSSEDLLELSDVDSESSDISQPYVVCRQCPEYRRQAAQPPHCPAPEGEPGAPQALGDAPSTSVSLTTAVQDYVCPLQGSHALCTCCFQPMPDRRAEREQDPRVAPQQCAVCLQPFCHLYWGCTRTGCYGCLAPFCELNLGDKCLDGVLNNNSYESDILKNYLATRGLTWKNMLTESLVALQRGVFLLSDYRVTGDTVLCYCCGLRSFRELTYQYRQNIPASELPVAVTSRPDCYWGRNCRTQVKAHHAMKFNHICEQTRFKN

SEQ ID NO: 142 - protein, 572 aa, Homo sapiens
MERPEEGKQSPPPQPWGRLLRLGAEEGEPHVLLRKREWTIGRRRGCDLSFPSNKLVSGDHCRIVVDEKSGQVTLEDTSTSGTVINKLKVVKKQTCPLQTGDVIYLVYRKNEPEHRSGGGGISPKGSGPSVASDEVSSFASALPDRKTASFSSLEPQDQEDLEPVKKKMRGDGDLDLNGQLLVAQPRRNAQTVHEDVRAAAGKPDKMEETLTCIICQDLLHDCVSLQPCMHTFCAACYSGWMERSSLCPTCRCPVERICKNHILNNLVEAYLIQHPDKSRSEEDVQSMDARNKITQDMLQPKVRRSFSDEEGSSEDLLELSDVDSESSDISQPYVVCRQCPEYRRQAAQPPHCPAPEGEPGAPQALGDAPSTSVSLTTAVQDYVCPLQGSHALCTCCFQPMPDRRAEREQDPRVAPQQCAVCLQPFCHLYWGCTRTGCYGCLAPFCELNLGDKCLDGVLNNNSYESDILKNYLATRGLTWKNMLTESLVALQRGVFLLSDYRVTGDTVLCYCCGLRSFRELTYQYRQNIPASELPVAVTSRPDCYWGRNCRTQVKAHHAMKFNHICEQTRFKN

SEQ ID NO: 143 - protein, 623 aa, Homo sapiens
MERPEEGKQSPPPQPWGRLLRLGAEEGEPHVLLRKREWTIGRRRGCDLSFPSNKLVSGDHCRIVVDEKSGQVTLEDTSTSGTVINKLKVVKKQTCPLQTGDVIYLVYRKNEPEHNVAYLYESLSEKQGMTQESFEMVPCCVAQAGLKLLGSSDPPTLASQSIVITGSGGGGISPKGSGPSVASDEVSSFASALPDRKTASFSSLEPQDQEDLEPVKKKMRGDGDLDLNGQLLVAQPRRNAQTVHEDVRAAAGKPDKMEETLTCIICQDLLHDCVSLQPCMHTFCAACYSGWMERSSLCPTCRCPVERICKNHILNNLVEAYLIQHPDKSRSEEDVQSMDARNKITQDMLQPKVRRSFSDEEGSSEDLLELSDVDSESSDISQPYVVCRQCPEYRRQAAQPPHCPAPEGEPGAPQALGDAPSTSVSLTTAVQDYVCPLQGSHALCTCCFQPMPDRRAEREQDPRVAPQQCAVCLQPFCHLYWGCTRTGCYGCLAPFCELNLGDKCLDGVLNNNSYESDILKNYLATRGLTWKNMLTESLVALQRGVFLLSDYRVTGDTVLCYCCGLRSFRELTYQYRQNIPASELPVAVTSRPDCYWGRNCRTQVKAHHAMKFNHICEQTRFKN

SEQ ID NO: 144 - protein, 567 aa, Homo sapiens
MDGSRRVRATSVLPRYGPPCLFKGHLSTKSNAAVDCSVPVSVSTSIKYADQQRREKLKKELAQCEKEFKLTKTAMRANYKNNSKSLFNTLQKPSGEPQIEDDMLKEEMNGFSSFARSLVPSSERLHLSLHKSSKVITNGPEKNSSSSPSSVDYAASGPRKLSSGALYGRRPRSTFPNSHRFQLVISKAPSGDLLDKHSELFSNKQLPFTPRTLKTEAKSFLSQYRYYTPAKRKKDFTDQRIEAETQTELSFKSELGTAETKNMTDSEMNIKQASNCVTYDAKEKIAPLPLEGHDSTWDEIKDDALQHSSPRAMCQYSLKPPSTRKIYSDEEELLYLSFIEDVTDEILKLGLFSNRFLERLFERHIKQNKHLEEEKMRHLLHVLKVDLGCTSEENSVKQNDVDMLNVFDFEKAGNSEPNELKNESEVTIQQERQQYQKALDMLLSAPKDENEIFPSPTEFFMPIYKSKHSEGVIIQQVNDETNLETSTLDENHPSISDSLTDRETSVNVIEGDSDPEKVEISNGLCGLNTSPSQSVQFSSVKGDNNHDMELSTLKIMEMSIEDCPLDV

SEQ ID NO: 145 - protein, 599 aa, Homo sapiens
MDGSRRVRATSVLPRYGPPCLFKGHLSTKSNAFCTDSSSLRLSTLQLVKNHMAVHYNKILSAKAAVDCSVPVSVSTSIKYADQQRREKLKKELAQCEKEFKLTKTAMRANYKNNSKSLFNTLQKPSGEPQIEDDMLKEEMNGFSSFARSLVPSSERLHLSLHKSSKVITNGPEKNSSSSPSSVDYAASGPRKLSSGALYGRRPRSTFPNSHRFQLVISKAPSGDLLDKHSELFSNKQLPFTPRTLKTEAKSFLSQYRYYTPAKRKKDFTDQRIEAETQTELSFKSELGTAETKNMTDSEMNIKQASNCVTYDAKEKIAPLPLEGHDSTWDEIKDDALQHSSPRAMCQYSLKPPSTRKIYSDEEELLYLSFIEDVTDEILKLGLFSNRFLERLFERHIKQNKHLEEEKMRHLLHVLKVDLGCTSEENSVKQNDVDMLNVFDFEKAGNSEPNELKNESEVTIQQERQQYQKALDMLLSAPKDENEIFPSPTEFFMPIYKSKHSEGVIIQQVNDETNLETSTLDENHPSISDSLTDRETSVNVIEGDSDPEKVEISNGLCGLNTSPSQSVQFSSVKGDNNHDMELSTLKIMEMSIEDCPLDV

SEQ ID NO: 146 - protein, 714 aa, Homo sapiens
MGLPEERVRSGSGSRGQEEAGAGGRARSWSPPPEVSRSAHVPSLQRYRELHRRSVEEPREFWGDIAKEFYWKTPCPGPFLRYNFDVTKGKIFIEWMKGATTNICYNVLDRNVHEKKLGDKVAFYWEGNEPGETTQITYHQLLVQVCQFSNVLRKQGIQKGDRVAIYMPMIPELVVAMLACARIGALHSIVFAGFSSESLCERILDSSCSLLITTDAFYRGEKLVNLKELADEALQKCQEKGFPVRCCIVVKHLGRAELGMGDSTSQSPPIKRSCPDVQGKLKEKSKRVQPQISWNQGIDLWWHELMQEAGDECEPEWCDAEDPLFILYTSGSTGKPKGVVHTVGGYMLYVATTFKYVFDFHAEDVFWCTADIGWITGHSYVTYGPLANGATSVLFEGIPTYPDVNRLWSIVDKYKVTKFYTAPTAIRLLMKFGDEPVTKHSRASLQVLGTVGEPINPEAWLWYHRVVGAQRCPIVDTFWQTETGGHMLTPLPGATPMKPGSATFPFFGVAPAILNESGEELEGEAEGYLVFKQPWPGIMRTVYGNHERFETTYFKKFPGYYVTGDGCQRDQDGYYWITGRIDDMLNVSGHLLSTAEVESALVEHEAVAEAAVVGHPHPVKGECLYCFVTLCDGHTFSPKLTEELKKQIREKIGPIATPDYIQNAPGLPKTRSGKIMRRVLRKIAQNDHDLGDMSTVADPSVISHLFSHRCLTIQ

SEQ ID NO: 147 - protein, 701 aa, Homo sapiens [sequence omitted]

SEQ ID NO: 148 - protein, 688 aa, Homo sapiens
MGSENSALKSYTLREPPFTLPSGLAVYPAVLQDGKFASVFVYKRENEDKVNKAAKHLKTLRHPCLLRFLSCTVEADGIHLVTERVQPLEVALETLSSAEVCAGIYDILLALIFLHDRGHLTHNNVCLSSVFVSEDGHWKLGGMETVCKVSQATPEFLRSIQSIRDPASIPPEEMSPEFTTLPECHGHARDAFSFGTLVESLLTILNEQVSADVLSSFQQTLHSTLLNPIPKCRPALCTLLSHDFFRNDFLEVVNFLKSLTLKSEEEKTEFFKFLLDRVSCLSEELIASRLVPLLLNQLVFAEPVAVKSFLPYLLGPKKDHAQGETPCLLSPALFQSRVIPVLLQLFEVHEEHVRMVLLSHIEAYVEHFTQEQLKKVILPQVLLGLRDTSDSIVAITLHSLAVLVSLLGPEVVVGGERTKIFKRTAPSFTKNTDLSLEGDPFSQPIKFPINGLSDVKNTSEDSENFPSSSKKSEEWPDWSEPEEPENQTVNIQIWPREPCDDVKSQCTTLDVEESSWDDCEPSSLDTKVNPGGGITATKPVTSGEQKPIPALLSLTEESMPWKSSLPQKISLVQRGDDADQIEPPKVSSQERPLKVPSELGLGEEFTIQVKKKPVKDPEMDWFADMIPEIKPSAAFLILPELRTEMVPKKDDVSPVMQFSSKFAAAEITEGEAEGWEEEGELNWEDNNW

SEQ ID NO: 149 - protein, 742 aa, Homo sapiens
MGSENSALKSYTLREPPFTLPSGLAVYPAVLQDGKFASVFVYKRENEDKVNKAAKHLKTLRHPCLLRFLSCTVEADGIHLVTERVQPLEVALETLSSAEVCAGIYDILLALIFLHDRGHLTHNNVCLSSVFVSEDGHWKLGGMETVCKVSQATPEFLRSIQSIRDPASIPPEEMSPEFTTLPECHGHARDAFSFGTLVESLLTILNEQVSADVLSSFQQTLHSTLLNPIPKCRPALCTLLSHDFFRNDFLEVVNFLKSLTLKSEEEKTEFFKFLLDRVSCLSEELIASRLVPLLLNQLVFAEPVAVKSFLPYLLGPKKDHAQGETPCLLSPALFQSRVIPVLLQLFEVHEEHVRMVLLSHIEAYVEHFTQEQLKKVILPQVLLGLRDTSDSIVAITLHSLAVLVSLLGPEVVVGGERTKIFKRTAPSFTKNTDLSLEDSPMCVVCSHHSQISPILENPFSSIFPKCFFSGSTPINSKKHIQRDYYNTLLQTGDPFSQPIKFPINGLSDVKNTSEDSENFPSSSKKSEEWPDWSEPEEPENQTVNIQIWPREPCDDVKSQCTTLDVEESSWDDCEPSSLDTKVNPGGGITATKPVTSGEQKPIPALLSLTEESMPWKSSLPQKISLVQRGDDADQIEPPKVSSQERPLKVPSELGLGEEFTIQVKKKPVKDPEMDWFADMIPEIKPSAAFLILPELRTEMVPKKDDVSPVMQFSSKFAAAEITEGEAEGWEEEGELNWEDNNW

SEQ ID NO: 150 - protein, 1983 aa, Homo sapiens
MSGNKRGSRASCPHRGAECLLPWAALNLQGFQLLLLHPSATAMMDVSELGESARYLRQGYQEMTKVHTIPWDGKKRVWVPDEQDAYVEAEVKSEATGGRVTVETKDQKVLMVREAELQPMNPPRFDLLEDMAMMTHLNEASVLHNLRQRYARWMIYTYSGLFCVTINPYKWLPVYTASVVAAYKGKRRSDSPPHIYAVADNAYNDMLRNRDNQSMLITGESGAGKTVNTKRVIQYFAIVAALGDGPGKKAQFLATKTGGTLEDQIIEANPAMEAFGNAKTLRNDNSSRFGKFIRIHFGPSGKLASADIDSYLLEKSRVIFQLPGERSYHVYYQILSGRKPELQDMLLLSMNPYDYHFCSQGVITVDNMNDGEELIATDHAMDILGFSVDEKCACYKIVGALLHFGNMKFKQKQREEQAEADGTESADKAAYLMGVSSGDLLKGLLHPRVRVGNEYVTKGQSVEQVVFAVGALAKATYDRLFRWLVSRINQTLDTKLPRQFFIGVLDIAGFEIFEFNSFEQLCINFTNEKLQQFFNQHMFVLEQEEYKREGIDWVFIDFGLDLQPCIDLIEKPLGILSILEEECMFPKASDASFRAKLYDNHAGKSPNFQQPRPDKKRKYQAHFEVVHYAGVVPYSIVGWLEKNKDPLNETVVPIFQKSQNRLLATLYENYAGSCSTEPPKSGVKEKRKKAASFQTVSQLHKENLNKLMTNLRATQPHFVRCIVPNENKTPGVMDAFLVLHQLRCNGVLEGIRICRQGFPNRLLYTDFRQRYRILNPSAIPDDTFMDSRKATEKLLGSLDLDHTQYQFGHTKVFFKAGLLGVLEELRDQRLAKVLTLLQARSRGRLMRLEYQRLLGGRDALFTIQWNIRAFNAVKNWSWMKLFFKMKPLLRSAQAEEELAALRAELRGLRGALAAAEAKRQELEETHVSITQEKNDLALQLQAEQDNLADAEERCHLLIKSKVQLEGKVKELSERLEDEEEVNADLAARRRKLEDECTELKKDIDDLKLTLAKAEKEKQATENKVKNLTEEMAALDESVARLTKEKKALQEAHQQALGDLQAEEDRVSALTKAKLRLEQQVEDLECSLEQEKKLRMDTERAKRKLEGDLKLTQESVADAAQDKQQLEEKLKKKDSELSQLSLRVEDEQLLGAQMQKKIKELQARAEELEEELEAERAARARVEKQRAEAARELEELSERLEEAGGASAGQREGCRKREAELGRLRRELEEAALRHEATVAALRRKQAEGAAELGEQVDSLQRVRQKLEKEKSELRMEVDDLAANVETLTRAKASAEKLCRTYEDQLSEAKIKVEELQRQLADASTQRGRLQTESGELSRLLEEKECLISQLSRGKALAAQSLEELRRQLEEESKAKSALAHAVQALRHDCDLLREQHEEEAEAQAELQRLLSKANAEVAQWRSKYEADAIQRTEELEEAKKKLALRLQEAEEGVEAANAKCSSLEKAKLRLQTESEDVTLELERATSAAAALDKKQRHLERALEERRRQEEEMQRELEAAQRESRGLGTELFRLRHGHEEALEALETLKRENKNLQEEISDLTDQVSLSGKSIQELEKTKKALEGEKSEIQAALEEAEGALELEETKTLRIQLELSQVKAEVDRKLAEKDEECANLRRNHQRAVESLQASLDAETRARNEALRLKKKMEGDLNDLELQLGHATRQATEAQAATRLMQAQLKEEQAGRDEEQRLAAELHEQAQALERRASLLAAELEELRAALEQGERSRRLAEQELLEATERLNLLHSQNTGLLNQKKKLEADLAQLSGEVEEAAQERREAEEKAKKAITDAAMMAEELKKEQDTSAHLERMKKTLEQTVRELQARLEEAEQAALRGGKKQVQKLEAKVRELEAELDAEQKKHAEALKGVRKHERRVKELAYQAEEDRKNLARMQDLVDKLQSKVKSYKRQFEEAEQQANTNLAKYRKAQHELDDAEERADMAETQANKLRARTRDALGPKHKE

SEQ ID NO: 151 - protein, 563 aa, Homo sapiens
MAALSPTFATSTQDSTCLQDSEFPVSSKDHSCPQNLDLFVCSGLEPHTPSVGSQESVTFQDVAVDFTEKEWPLLDSSQRKLYKDVMLENYSNLTSLDWETPSKTKWSLLMEDIFGKETPSGVTMERAGLGEKSTEYAHLFEVFGMDPHLTQPMGRHAGKRPYHRRDYGVAFKGRPHLTQHMSMYDGRKMHECHQCQKAFTTSASLTRHRRIHTGEKPYECSDCGKAFNDPSALRSHARTHLKEKPFDCSQCGNAFRTLSALKIHMRVHTGERPYKCDQCGKAYGRSCHLIAHKRTHTGERPYECHDCGKAFQHPSHLKEHVRNHTGEKPYACTQCGKAFRWKSNFNLHKKNHMVEKTYECKECGKSFGDLVSRRKHMRIHIVKKPVECRQCGKTFRNQSILKTHMNSHTGEKPYGCDLCGKAFSASSNLTAHRKIHTQERRYECAACGKVFGDYLSRRRHMSVHLVKKRVECRQCGKAFRNQSTLKTHMRSHTGEKPYECDHCGKAFSIGSNLNVHRRIHTGEKPYECLVCGKAFSDHSSLRSHVKTHRGEKLFVSSVWKRLQ

SEQ ID NO: 152 - protein, 595 aa, Homo sapiens
MAALSPTFATSTQDSTCLQDSEFPVSSKDHSCPQNLDLFVCSGLEPHTPSVGSQESVTFQDVAVDFTEKEWPLLDSSQRKLYKDVMLENYSNLTSLGYQVGKPSLISHLEQEEEPRTEERGAHQGACADWETPSKTKWSLLMEDIFGKETPSGVTMERAGLGEKSTEYAHLFEVFGMDPHLTQPMGRHAGKRPYHRRDYGVAFKGRPHLTQHMSMYDGRKMHECHQCQKAFTTSASLTRHRRIHTGEKPYECSDCGKAFNDPSALRSHARTHLKEKPFDCSQCGNAFRTLSALKIHMRVHTGERPYKCDQCGKAYGRSCHLIAHKRTHTGERPYECHDCGKAFQHPSHLKEHVRNHTGEKPYACTQCGKAFRWKSNFNLHKKNHMVEKTYECKECGKSFGDLVSRRKHMRIHIVKKPVECRQCGKTFRNQSILKTHMNSHTGEKPYGCDLCGKAFSASSNLTAHRKIHTQERRYECAACGKVFGDYLSRRRHMSVHLVKKRVECRQCGKAFRNQSTLKTHMRSHTGEKPYECDHCGKAFSIGSNLNVHRRIHTGEKPYECLVCGKAFSDHSSLRSHVKTHRGEKLFVSSVWKRLQ

SEQ ID NO: 153 - protein, 508 aa, Homo sapiens
MNENKDTDSKKSEEYEDDFEKDLEWLINENEKSDASIIEMACEKEENINQDLKENETVMEHTKRHSDPDKSLQDEVSPRRNDIISVPGIQPLDPISDSDSENSFQESKLESQKDLEEEEDEEVRRYIMEKIVQANKLLQNQEPVNDKRERKLKFKDQLVDLEVPPLEDTTTFKNYFENERNMFGKLSQLCISNDFGQEDVLLSLTNGSCEENKDRTILVERDGKFELLNLQDIASQGFLPPINNANSTENDPQQLLPRSSNSSVSGTKKEDSTAKIHAVTHSSTGEPLAYIAQPPLNRKTCPSSAVNSDRSKGNGKSNHRTQSAHISPVTSTYCLSPRQKELQKQLEEKREKLKREEERRKIEEEKEKKRENDIVFKAWLQKKREQVLEMRRIQRAKEIEDMNSRENRDPQQAFRLWLKKKHEEQMKERQTEELRKQEECLFFLKGTEGRERAFKQWLRRKRMEKMAEQQAVRERTRQLRLEAKRSKQLQHHLYMSEAKPFRFTDHYN

SEQ ID NO: 154 - protein, 569 aa, Homo sapiens
MLLLFSVILISWVSTVGGEGTLCDFPKIHHGFLYDEEDYNPFSQVPTGEVFYYSCEYNFVSPSKSFWTRITCTEEGWSPTPKCLRMCSFPFVKNGHSESSGLIHLEGDTVQIICNTGYSLQNNEKNISCVERGWSTPPICSFTKGECHVPILEANVDAQPKKESYKVGDVLKFSCRKNLIRVGSDSVQCYQFGWSPNFPTCKGQVRSCGPPPQLSNGEVKEIRKEEYGHNEVVEYDCNPNFIINGPKKIQCVDGEWTTLPTCVEQVKTCGYIPELEYGYVQPSVPPYQHGVSVEVNCRNEYAMIGNNMITCINGIWTELPMCVATHQLKRCKIAGVNIKTLLKLSGKEFNHNSRIRYRCSDIFRYRHSVCINGKWNPEVDCTEKREQFCPPPPQIPNAQNMTTTVNYQDGEKVAVLCKENYLLPEAKEIVCKDGRWQSLPRCVESTAYCGPPPSINNGDTTSFPLSVYPPGSTVTYRCQSFYKLQGSVTVTCRNKQWSEPPRCLDPCVVSEENMNKNNIQLKWRNDGKLYAKTGDAVEFQCKFPHKAMISSPPFRAICQEGKFEYPICE

SEQ ID NO: 155 - protein, 156 aa, Homo sapiens
MAPARAGFCPLLLLLLLGLWVAEIPVSAKPKGMTSSQWFKIQHMQPSPQACNSAMKNINKHTKRCKDLNTFLHEPFSSVAATCQTPKIACKNGDKNCHQSHGAVSLTMCKLTSGKYPNCRYKEKRQNKSYVVACKPPQKKDSQQFHLVPVHLDRVL

SEQ ID NO: 156 - protein, 767 aa, Homo sapiens
MSHAVTIEEPQAQPQVSQTRYRERSRAGSHISSNRAYDFLYDPLFIVSSEKDHTQANIQATLIRSRLRKVPRFKTMFSNLIHYPRYSLYWSKSDPVPPFISREWKGHKEKHREALRQLTTTDASFQMPKEVYEDPEVTGKNRYKYFERPFLPFFQQMPFNVVYAVSKAEPYTFPPTSTKHLSIPSKSTVGTQTDYRDADVQTDPYSPEYVVCQDSIPELLTLATLTWGRGLPAGQAEVEMIERAREKRAWEASLPALSDTSQFEKRRKMMNEMERKEWAFREQEIEKLQEIRLEVLKELLRKREENQNEVNMKHLNARWSKLQEGKEAKMAKIQRTHVSTIRKLVGKRKNIEGKLERRNIIKDYSDYASQVYGPLSRLGCFPDNNSEDFVVKNYYLNTYEGLVELESCLPDFVTQPQIRAPKPKVITTKAGFLKRAARLDYELAEVHKALLDKKNKVLEVKKPPRFLQRNPIPQPRLPTPTLEMTSNEEEEMEMAVIYLQKLLRGRVVQNMMFEGKEKRLELIQELRTCHALQEDEKLVKKAEKQVTLALQRQRNLHEHKVSLVENHLAGLEGRALADMFDFLSKELVRLQEERRIHAFVMLAERQRRVREAEESGRRQVEKQRLREEDEIFKEVVKVHHSTISSYLEDIILNTEANTAEEQARAEIEKMAEKINDIAYEMESRRTYLQSEEIVAELVYSFLIPEVQKYFVKEKVRNAQRKHILAAHQIIHSYTESMVQKKLTEGEQDEASNAAMLLEKETQNENNS

SEQ ID NO: 157 - protein, 331 aa, Homo sapiens
MSRYLLPLSALGTVAGAAVLLKDYVTGGACPSKATIPGKTVIVTGANTGIGKQTALELARRGGNIILACRDMEKCEAAAKDIRGETLNHHVNARHLDLASLKSIREFAAKIIEEEERVDILINNAGVMRCPHWTTEDGFEMQFGVNHLGHFLLTNLLLDKLKASAPSRIINLSSLAHVAGHIDFDDLNWQTRKYNTKAAYCQSKLAIVLFTKELSRRLQGSGVTVNALHPGVARTELGRHTGIHGSTFSSTTLGPIFWLLVKSPELAAQPSTYLAVAEELADVSGKYFDGLKQKAPAPEAEDEEVARRLWAESARLVGLEAPSVREQPLPR

SEQ ID NO: 158 - protein, 260 aa, Homo sapiens
MEKCEAAAKDIRGETLNHHVNARHLDLASLKSIREFAAKIIEEEERVDILINNAGVMRCPHWTTEDGFEMQFGVNHLGHFLLTNLLLDKLKASAPSRIINLSSLAHVAGHIDFDDLNWQTRKYNTKAAYCQSKLAIVLFTKELSRRLQGSGVTVNALHPGVARTELGRHTGIHGSTFSSTTLGPIFWLLVKSPELAAQPSTYLAVAEELADVSGKYFDGLKQKAPAPEAEDEEVARRLWAESARLVGLEAPSVREQPLPR

SEQ ID NO: 159 - protein, 1099 aa, Homo sapiens
MFGSAPQRPVAMTTAQRDSLLWKLAGLLRESGDVVLSGCSTLSLLTPTLQQLNHVFELHLGPWGPGQTGFVALPSHPADSPVILQLQFLFDVLQKTLSLKLVHVAGPGPTGPIKIFPFKSLRHLELRGVPLHCLHGLRGIYSQLETLICSRSLQALEELLSACGGDFCSALPWLALLSANFSYNALTALDSSLRLLSALRFLNLSHNQVQDCQGFLMDLCELHHLDISYNRLHLVPRMGPSGAALGVLILRGNELRSLHGLEQLRNLRHLDLAYNLLEGHRELSPLWLLAELRKLYLEGNPLWFHPEHRAATAQYLSPRARDAATGFLLDGKVLSLTDFQTHTSLGLSPMGPPLPWPVGSTPETSGGPDLSDSLSSGGVVTQPLLHKVKSRVRVRRASISEPSDTDPEPRTLNPSPAGWFVQQHPELELMSSFRERFGRNWLQYRSHLEPSGNPLPATPTTSAPSAPPASSQGPDTAPRPSPPQEEARGPQESPQKMSEEVRAEPQEEEEEKEGKEEKEEGEMVEQGEEEAGEEEEEEQDQKEVEAELCRPLLVCPLEGPEGVRGRECFLRVTSAHLFEVELQAARTLERLELQSLEAAEIEPEAQAQRSPRPTGSDLLPGAPILSLRFSYICPDRQLRRYLVLEPDAHAAVQELLAVLTPVTNVAREQLGEARDLLLGRFQCLRCGHEFKPEEPRMGLDSEEGWRPLFQKTESPAVCPNCGSDHVVLLAVSRGTPNRERKQGEQSLAPSPSASPVCHPPGHGDHLDRAKNSPPQAPSTRDHGSWSLSPPPERCGLRSVDHRLRLFLDVEVFSDAQEEFQCCLKVPVALAGHTGEFMCLVVVSDRRLYLLKVTGEMREPPASWLQLTLAVPLQDLSGIELGLAGQSLRLEWAAGAGRCVLLPRDARHCRAFLEELLDVLQSLPPAWRNCVSATEEEVTPQHRLWPLLEKDSSLEARQFFYLRAFLVEGPSTCLVSLLLTPSTLFLLDEDAAGSPAEPSPPAASGEASEKVPPSGPGPAVRVREQQPLSSLSSVLLYRSAPEDLRLLFYDEVSRLESFWALRVVCQEQLTALLAWIREPWEELFSIGLRTVIQEALALDR

SEQ ID NO: 160 - protein, 515 aa, Homo sapiens
MSSEMEPLLLAWSYFRRRKFQLCADLCTQMLEKSPYDQEPDPELPVHQAAWILKARALTEMVYIDEIDVDQEGIAEMMLDENAIAQVPRPGTSLKLPGTNQTGGPSQAVRPITQAGRPITGFLRPSTQSGRPGTMEQAIRTPRTAYTARPITSSSGRFVRLGTASMLTSPDGPFINLSRLNLTKYSQKPKLAKALFEYIFHHENDVKTALDLAALSTEHSQYKDWWWKVQIGKCYYRLGMYREAEKQFKSALKQQEMVDTFLYLAKVYVSLDQPVTALNLFKQGLDKFPGEVTLLCGIARIYEEMNNMSSAAEYYKEVLKQDNTHVEAIACIGSNHFYSDQPEIALRFYRRLLQMGIYNGQLFNNLGLCCFYAQQYDMTLTSFERALSLAENEEEAADVWYNLGHVAVGIGDTNLAHQCFRLALVNNNNHAEAYNNLAVLEMRKGHVEQARALLQTASSLAPHMYEPHFNFATISDKIGDLQRSYVAAQKSEAAFPDHVDTQHLIKQLRQHFAML

SEQ ID NO: 161 - protein, 505 aa, Homo sapiens
MSSEMEPLLLAWSYFRRRKFQLCADLCTQMLEKSPYDQAAWILKARALTEMVYIDEIDVDQEGIAEMMLDENAIAQVPRPGTSLKLPGTNQTGGPSQAVRPITQAGRPITGFLRPSTQSGRPGTMEQAIRTPRTAYTARPITSSSGRFVRLGTASMLTSPDGPFINLSRLNLTKYSQKPKLAKALFEYIFHHENDVKTALDLAALSTEHSQYKDWWWKVQIGKCYYRLGMYREAEKQFKSALKQQEMVDTFLYLAKVYVSLDQPVTALNLFKQGLDKFPGEVTLLCGIARIYEEMNNMSSAAEYYKEVLKQDNTHVEAIACIGSNHFYSDQPEIALRFYRRLLQMGIYNGQLFNNLGLCCFYAQQYDMTLTSFERALSLAENEEEAADVWYNLGHVAVGIGDTNLAHQCFRLALVNNNNHAEAYNNLAVLEMRKGHVEQARALLQTASSLAPHMYEPHFNFATISDKIGDLQRSYVAAQKSEAAFPDHVDTQHLIKQLRQHFAML

SEQ ID NO: 162 - protein, 475 aa, Homo sapiens
MSSEMEPLLLAWSYFRRRKFQLCADLCTQMLEKSPYDQAAWILKARALTEMVYIDEIDVDQEGIAEMMLDENAIAQVPRPGTSLKLPGTNQTGGPSQAVRPITQAGRPITGFLRPSTQSGRPGTMEQAIRTPRTAYTARPITSSSGRFVRLGTALFEYIFHHENDVKTALDLAALSTEHSQYKDWWWKVQIGKCYYRLGMYREAEKQFKSALKQQEMVDTFLYLAKVYVSLDQPVTALNLFKQGLDKFPGEVTLLCGIARIYEEMNNMSSAAEYYKEVLKQDNTHVEAIACIGSNHFYSDQPEIALRFYRRLLQMGIYNGQLFNNLGLCCFYAQQYDMTLTSFERALSLAENEEEAADVWYNLGHVAVGIGDTNLAHQCFRLALVNNNNHAEAYNNLAVLEMRKGHVEQARALLQTASSLAPHMYEPHFNFATISDKIGDLQRSYVAAQKSEAAFPDHVDTQHLIKQLRQHFAML

SEQ ID NO: 163 - protein, 1977 aa, Homo sapiens
MAARSAPSCHLRLEWVYGYRGHQCRNNLYYTAAKEIVYFVAGVGVVYSPREHRQKFYRGHSDDIISLALHPERVLVATGQVGKEPYICIWDSYTVQTISVLKDVHTHGIACLAFDLDGQRLVSVGLDSKNAVCVWDWKRGKMLSMAPGHTDRIFDISWDLYQPNKLVSCGVKHIKFWSLCGNALTPKRGVFGKTGDLQTILCLACARDELTYSGALNGDIYVWKGINLIRTIQGAHAAGIFSMNACEEGFATGGRDGCIRLWDLTFKPITVIDLRETDQGYKGLSVRSVCWRGDHILVGTQDSEIFEIVVQERNKPFLIMQGHCEGELWALAVHPTKPLAVTGSDDRSVRIWSLVDHALIARCNMEEPIRCAAVNADGIHLALGMKDGSFTVLRVRDMTEVVHIKDRKEAIHELKYSPDGTYLAVGCNDSSVDIYGVAQRYKKVGECLGSLSFITHLDWSSDSRYLQTNDGNGKRLFYRMPGGKEVTSTEEIKGVHWASWTCVSGLEVNGIWPKYSDINDINSVDGNYIGQVLVTADDYGIIKLFRYPCLRKGAKFRKYIGHSAHVTNVRWSHDYQWVISIGGADHSVFQWKFIPERKLKDAVHIAPQESLADSHSDESDSDLSDVPELDSEIEQETQLTYRRQVYKEDLPQLKEQCKEKQKSATSKRRERAPGNSIRLHFVHGYRGYDCRSNLFYTQIGEIVYHVAAVGVIYNRQQNTQRFYLGHDDDILCLTIHPLKDYVATGQVGRDPSIHIWDTETIKPLSILKGHHQYGVSAVDFSADGKRLASVGIDDSHTVVLWDWKKGEKLSIARGSKDKIFVVKMNPYVPDKLITAGIKHMKFWRKAGGGLIGRKGYIGTLGKNDTMMCAVYGWTEEMAFSGTSTGDVCIWRDIFLVKTVKAHDGPVFSMHALEKGFVTGGKDGIVALWDDSFERCLKTYAIKRAALAPGSKGLLLEDNPSIRAISLGHGHILVGTKNGEILEVDKSGPITLLVQGHMEGEVWGLATHPYLPICATVSDDKTLRIWDLSPSHCMLAVRKLKKGGRCCCFSPDGKALAVGLNDGSFLMANADTLEDLVSFHHRKDMISDIRFSPGSGKYLAVASHDSFIDIYNVMSSKRVGICKGATSYITHIDWDIRGKLLQVNTGAKEQLFFEAPRGKKQTIPSVEVEKIAWASWTSVLGLCCEGIWPVIGEVTDVTASCLTSDKMVLATGDDLGFVKLFRYPTKGKFGKFKRYVAHSTHVTNVRWTYDDSMLVTLGGTDMSLMVWTNEMEGYREKRPCDSEESDIDSEEDGGYDSDVTRENEISYTIRALSTNIRPMLGIKPHLQQKEPSIDERQGVVRGSRPPVSRAPPQPEKLQTNNVGKKKRPIEDLVLELIFGYRGRDCRNNVHYLNDGDDIIYHTASVGILHNVATGSQSFYQEHNDDILCLTVNQHPKFINIVATGQVGDSADMSATAPSIHIWDAMNKQTLSILRCYHSKGVCSVSFSATGKLLLSVGLDPEHTITIWRWQEGAKIASRAGHNQRIFVAEFRPDSDTQFVSVGVKHVKFWTLAGRALLSKKGLLSTLEDARMQTMLAIAFGANNLTFTGTISGDVCVWKDHILCRIVARAHNGPVFAMYTTLRDGLIVTGGKERPSKEGGAVKLWDQELRRCRAFRLETGQATDCVRSVCRGKGKILVGTRNAEIIEVGEKNAACNILVNGHVDGPIWGLATHPSRDFFLSAAEDGTVRLWDIADKKMLNKVNLGHAARTVCYSPEGDMVAIGMKNGEFIILLVSSLKIWGKKRDRRCAIHDIRFSPDSRYLAVGSSENSVDFYDLTLGPTLNRISYCKDIPSFVIQMDFSADSSYLQVSSGCYKRHVYEVPSGKHLMDHAAIDRITWATWTSILGDEVLGIWSRHAEKADVNCACVSHSGISLVTGDDFGMVKLFDFPCPEKFAKHKRFLGHSPHVTNIRFTSGDRHVVSAGGDDCSLFVWKCVHTPH

SEQ ID NO: 164 - protein, 582 aa, Homo sapiens
MSSPNPEDVPRRPEPEPSSSNKKKKKRKWLRQEASIQALTRAGHGALQAGQNHEALNNFQRAFLLASKAPQTRDTPVLQACAFNLGAAYVETGDPARGLELLLRAHPEEKAQGRRHGDQCFNVALAYHALGELPQALAWYHRALGHYQPQGDQGEAWAKMGACYQALGQPELAAHCLQEASQAYAQERQLRAAALALGAAAGCMLKSGRHRVGEVVQVLEKSRRLAERSTERRLLGHLYNDLGLGYSQLQLFPLAVEAFLQALPLCWVPGEQATVLRNLGMAHNALGNYQEAREFHQKAADLHGSVGQRWEQGRSFGSLAFALSQLGDHKAARDNYLHALQAARDSGDMKGQWQACEGLGAAAARLGQYDQALKYYKEALAQCQKEPDSVRERLVAKLADTVRTRLAQVGLVQTHTLTSAPGRLQAPGGASQAEGTPAKAGSSTAGVQHRSSSGWEDEEFEEGHQKKKEERSANVPVRAGPGRPELCFLPGTVNHSHHLASSCPTFTKHTPCRGTVLGKASIYSPGPRAHLPFVGPGPPRAEYPSILVPNGPQANRSSRWPRESLSRSRQRRPMESGICTIV

SEQ ID NO: 165 - protein, 3477 aa, Homo sapiens
MANRRVGRGCWEVSPTERRPPAGLRGPAAEEEASSPPVLSLSHFCRSPFLCFGDVLLGASRTLSLALDNPNEEVAEVKISHFPAADLGFSVSQRCFVLQPKEKIVISVNWTPLKEGRVREIMTFLVNDVLKHQAILLGNAEEQKKKKRSLWDTIKKKKISASTSHNRRVSNIQNVNKTFSVSQKVDRVRSPLQACENLAMNEGGPPTENNSLILEENKIPISPISPAFNECHGATCLPLSVRRSTTYSSLHASENRELLNVHSANVSKVSFNEKAVTETSFNSVNVNGQRGENSKLSLTPNCSSTLNITQSQIHFLSPDSFVNNSHGANNELELVTCLSSDMFMKDNSQPVHLESTIAHEIYQKILSPDSFIKDNYGLNQDLESESVNPILSPNQFLKDNMAYMCTSQQTCKVPLSNENSQVPQSPEDWRKSEVSPRIPECQGSKSPKAIFEELVEMKSNYYSFIKQNNPKFSAVQDISSHSHNKQPKRRPILSATVTKRKATCTRENQTEINKPKAKRCLNSAVGEHEKVINNQKEKEDFHSYLPIIDPILSKSKSYKNEVTPSSTTASVARKRKSDGSMEDANVRVAITEHTEVREIKRIHFSPSEPKTSAVKKTKNVTTPISKRISNREKLNLKKKTDLSIFRTPISKTNKRTKPIIAVAQSSLTFIKPLKTDIPRHPMPFAAKNMFYDERWKEKQEQGFTWWLNFILTPDDFTVKTNISEVNAATLLLGIENQHKISVPRAPTKEEMSLRAYTARCRLNRLRRAACRLFTSEKMVKAIKKLEIEIEARRLIVRKDRHLWKDVGERQKVLNWLLSYNPLWLRIGLETTYGELISLEDNSDVTGLAMFILNRLLWNPDIAAEYRHPTVPHLYRDGHEEALSKFTLKKLLLLVCFLDYAKISRLIDHDPCLFCKDAEFKASKEILLAFSRDFLSGEGDLSRHLGLLGLPVNHVQTPFDEFDFAVTNLAVDLQCGVRLVRTMELLTQNWDLSKKLRIPAISRLQKMHNVDIVLQVLKSRGIELSDEHGNTILSKDIVDRHREKTLRLLWKIAFAFQVDISLNLDQLKEEIAFLKHTKSIKKTISLLSCHSDDLINKKKGKRDSGSFEQYSENIKLLMDWVNAVCAFYNKKVENFTVSFSDGRVLCYLIHHYHPCYVPFDAICQRTTQTVECTQTGSVVLNSSSESDDSSLDMSLKAFDHENTSELYKELLENEKKNFHLVRSAVRDLGGIPAMINHSDMSNTIPDEKVVITYLSFLCARLLDLRKEIRAARLIQTTWRKYKLKTDLKRHQEREKAARIIQLAVINFLAKQRLRKRVNAALVIQKYWRRVLAQRKLLMLKKEKLEKVQNKAASLIQGYWRRYSTRQRFLKLKYYSIILQSRIRMIIAVTSYKRYLWATVTIQRHWRAYLRRKQDQQRYEMLKSSTLIIQSMFRKWKQRKMQSQVKATVILQRAFREWHLRKQAKEENSAIIIQSWYRMHKELRKYIYIRSCVVIIQKRFRCFQAQKLYKRRKESILTIQKYYKAYLKGKIERTNYLQKRAAAIQLQAAFRRLKAHNLCRQIRAACVIQSYWRMRQDRVRFLNLKKTIIKFQAHVRKHQQRQKYKKMKKAAVIIQTHFRAYIFAMKVLASYQKTRSAVIVLQSAYRGMQARKMYIHILTSVIKIQSYYRAYVSKKEFLSLKNATIKLQSTVKMKQTRKQYLHLRAAALFIQQCYRSKKIAAQKREEYMQMRESCIKLQAFVRGYLVRKQMRLQRKAVISLQSYFRMRKARQYYLKMYKAIIVIQNYYHAYKAQVNQRKNFLQVKKAATCLQAAYRGYKVRQLIKQQSIAALKIQSAFRGYNKRVKYQSVLQSIIKIQRWYRAYKTLHDTRTHFLKTKAAVISLQSAYRGWKVRKQIRREHQAALKIQSAFRMAKAQKQFRLFKTAALVIQQNFRAWTAGRKQCMEYIELRHAVLVLQSMWKGKTLRRQLQRQHKCAIIIQSYYRMHVQQKKWKIMKKAALLIQKYYRAYSIGREQNHLYLKTKAAVVTLQSAYRGMKVRKRIKDCNKAAVTIQSKYRAYKTKKKYATYRASAIIIQRWYRGIKITNHQHKEYLNLKKTAIKIQSVYRGIRVRRHIQHMHRAATFIKAMFKMHQSRISYHTMRKAAIVIQVRCRAYYQGKMQREKYLTILKAVKVLQASFRGVRVRRTLRKMQTAATLIQSNYRRYRQQTYFNKLKKITKTVQQRYWAMKERNIQFQRYNKLRHSVIYIQAIFRGKKARRHLKMMHIAATLIQRRFRTLMMRRRFLSLKKTAILIQRKYRAHLCTKHHLQFLQVQNAVIKIQSSYRRWMIRKRMREMHRAATFIQSTFRMHRLHMRYQALKQASVVIQQQYQANRAAKLQRQHYLRQRHSAVILQAAFRGMKTRRHLKSMHSSATLIQSRFRSLLVRRRFISLKKATIFVQRKYRATICAKHKLYQFLHLRKAAITIQSSYRRLMVKKKLQEMQRAAVLIQATFRMYRTYITFQTWKHASILIQQHYRTYRAAKLQRENYIRQWHSAVVIQAAYKGMKARQLLREKHKASIVIQSTYRMYRQYCFYQKLQWATKIIQEKYRANKKKQKVFQHNELKKETCVQAGFQDMNIKKQIQEQHQAAIIIQKHCKAFKIRKHYLHLRATVVSIQRRYRKLTAVRTQAVICIQSYYRGFKVRKDIQNMHRAATLIQSFYRMHRAKVDYETKKTAIVVIQNYYRLYVRVKTERKNFLAVQKSVRTIQAAFRGMKVRQKLKNVSEEKMAAIVNQSALCCYRSKTQYEAVQSEGVMIQEWYKASGLACSQEAEYHSQSRAAVTIQKAFCRMVTRKLETQKCAALRIQFFLQMAVYRRRFVQQKRAAITLQHYFRTWQTRKQFLLYRKAAVVLQNHYRAFLSAKHQRQVYLQIRSSVIIIQARSKGFIQKRKFQEIKNSTIKIQAMWRRYRAKKYLCKVKAACKIQAWYRCWRAHKEYLAILKAVKIIQGCFYTKLERTRFLNVRASAIIIQRKWRAILPAKIAHEHFLMIKRHRAACLIQAHYRGYKGRQVFLRQKSAALIIQKYIRAREAGKHERIKYIEFKKSTVILQALVRGWLVRKRFLEQRAKIRLLHFTAAAYYHLNAVRIQRAYKLYLAVKNANKQVNSVICIQRWFRARLQEKRFIQKYHSIKKIEHEGQECLSQRNRAASVIQKAVRHFLLRKKQEKFTSGIIKIQALWRGYSWRKKNDCTKIKAIRLSLQVVNREIREENKLYKRTALALHYLLTYKHLSAILEALKHLEVVTRLSPLCCENMAQSGAISKIFVLIRSCNRSIPCMEVIRYAVQVLLNVSKYEKTTSAVYDVENCIDILLELLQIYREKPGNKVADKGGSIFTKTCCLLAILLKTTNRASDVRSRSKVVDRIYSLYKLTAHKHKMNTERILYKQKKNSSISIPFIPETPVRTRIVSRLKPDWVLRRDNMEEITNPLQAIQMVMDTLGIPY

SEQ ID NO: 166 - protein, 525 aa, Homo sapiens
MAGLWLGLVWQKLLLWGAASALSLAGASLVLSLLQRVASYARKWQQMRPIPTVARAYPLVGHALLMKPDGREFFQQIIEYTEEYRHMPLLKLWVGPVPMVALYNAENVEVILTSSKQIDKSSMYKFLEPWLGLGLLTSTGNKWRSRRKMLTPTFHFTILEDFLDIMNEQANILVKKLEKHINQEAFNCFFYITLCALDIICETAMGKNIGAQSNDDSEYVRAVYRMSEMIFRRIKMPWLWLDLWYLMFKEGWEHKKSLQILHTFTNSVIAERANEMNANEDCRGDGRGSAPSKNKRRAFLDLLLSVTDDEGNRLSHEDIREEVDTFMFEGHDTTAAAINWSLYLLGSNPEVQKKVDHELDDVFGKSDRPATVEDLKKLRYLECVIKETLRLFPSVPLFARSVSEDCEVAGYRVLKGTEAVIIPYALHRDPRYFPNPEEFQPERFFPENAQGRHPYAYVPFSAGPRNCIGQKFAVMEEKTILSCILRHFWIESNQKREELGLEGQLILRPSNGIWIKLKRRNADER

SEQ ID NO: 167 - protein, 372 aa, Homo sapiens
MRSVLRQRILKPKDVAIYSGEVNQVIADLIKRIYLLRSQAEDGETVTNVNDLFFKYSMEGVATILYESRLGCLENSIPQLTVEYIEALELMFSMFKTSMYAGAIPRWLRPFIPKPWREFCRSWDGLFKFSQIHVDNKLRDIQYQMDRGRRVSGGLLTYLFLSQALTLQEIYANVTEMLLAGVDTTSFTLSWTVYLLARHPEVQQTVYREIVKNLGERHVPTAADVPKVPLVRALLKETLRLFPVLPGNGRVTQEDLVIGGYLIPKGTQLALCHYATSYQDENFPRAKEFRPERWLRKGDLDRVDNFGSIPFGHGVRSCIGRRIAELEIHLVVIQLLQHFEIKTSSQTNAVHAKTHGLLTPGGPIHVRFVNRK

SEQ ID NO: 168 - protein, 1909 aa, Homo sapiens
MEGKRQLEKRDFGKRLSLDSSLVEYMDSNKYIEHLLTQLEEQHRSLWREKLAVARLQREVAQRTSEGAMHEKLIHELEEERHLRLQSEKRLQEVTLESERNRIQMRSLQQQFSRMEETVRNLLQSQGSPEQKKEETVNIMVYQEKLSEEERKHKEALEDLHMVVDEDSRSESSSTDEGKEKTKLLLERLKALEAENSALALENENQREQYERCLDEVANQVVQALLTQKDLREECVKLKTRVFDLEQQNRTLSILFQQRVRPTSDLLLQKLHSRLLDLSSGDLLSEVERNRSLTQSRTDAEVHEHQLNTKSALKCPGLGAVIPGHLCPRNSYSSSSELSLSSTCSEYSSGSSYTWHDGKNLRKRQSSQNWDKRLSIDSSLPSGFASPTNELPPTRIKESHILEGLRKLQKRKVLLEPPSVITKWGYKDCMNSNEGIYSPGIKSSSLKEYPPCKTADLGSPCKEPHKTFVYDLDSHVDADDDPSTLALLQAVPNQSCRPHGSKLTHSVSDSLFGWETNRKHFLEGTSSVYPKERPEKLTSCASSCPLEMKLCPSVQTPQVQRERGPQGQGHGRMALNLQLSDTDDNETFDELHIESSDEKSPSDVSLAADTDKSVENLDVLVGFGKSLCGSPEEEEKQVPIPSETRPKTFSFIKQQRVVKRTSSEECVTVIFDAEDGEPIEFSSHQTGVVTVTRNEISINSTPAGPKAEHTELLPQGIACLQPRAAARDYTFFKRSEEDTEKNIPKDNVDNVPRVSTESFSSRTVTQNPQQQKLVKPTHNISCQSNSRSSAPMGIYQKQNLTKIPPRGKSSPQKSKLMEPEATTLLPSSGLVTLEKSPALAPGKLSRFMKTESSGPLFELRSDPHIPKHSAQLPHSSRMPSRRDWVQCPKSQTPGSRSRPAIESSDSGEPPTRDEHCGSGPEAGVKSPSPPPPPGRSVSLLARPSYDYSPAPSSTKSETRVPSETARTPFKSPLLKGISAPVISSNPATTEVQRKKPSVAFKKPIFTHPMPSPEAVIQTRCPAHAPSSSFTVMALGPPKVSPKRGVPKTSPRQTLGTPQRDIGLQTPRISPSTHEPLEMTSSKSVSPGRKGQLNDSASTPPKPSFLGVNESPSSQVSSSSSSSSPAKSHNSPHGCQSAHEKGLKTRLPVGLKVLMKSPQLLRKSSTVPGKHEKDSLNEASKSSVAVNKSKPEDSKNPASMEITAGERNVTLPDSQAQGSLADGLPLETALQEPLESSIPGSDGRDGVDNRSMRRSLSSSKPHLKPALGMNGAKARSHSFSTHSGDKPSTPPIEGSGKVRTQIITNTAERGNSLTRQNSSTESSPNKAPSAPMLESLPSVGRPSGHPSSGKGSLGSSGSFSSQHGSPSKLPLRIPPKSEGLLIPPGKEDQQAFTQGECPSANVAVLGEPGSDRRSCPPTPTDCPEALQSPGRTQHPSTFETSSTSKLETSGRHPDASATATDAVSSEAPLSPTIEEKVMLCIQENVEKGQVQTKPTSVEAKQKPGPSFASWFGFRKSRLPALSSRKMDISKTKVEKKDAKVLGFGNRQLKSERKKEKKKPELQCETENELIKDTKSADNPDGGLQSKNNRRTPQDIYNQLKIEPRNRHSPVACSTKDTFMTELLNRVDKKAAPQTESGSSNASCRNVLKGSSQGSCLIGSSISTQGNHKKNMKIKADMEVPKDSLVKEANENLQEDEDDAVADSVFQSHIIESNCQMRTLDSGIGTFPLPDSGNRSTGRYLCQPDSPEDAEPLLPLQSALSAVSSMRAQTLEREVPSSTDGQRPADSAIVHSTSDPIMTARGMRPLQSRLPKPASSGKVSSQKQNEAEPRPQTCSSFGYAEDPMASQPLPDWGSEVAATGTQDKAPRMCTYSASGGSNSDSDLDYGDNGFGAGRGQLVKALKSAAPEIETT

SEQ ID NO: 169 - DNA, 201 bp, Homo sapiens
ggtgggccaccgtgtccactactatgtcttcaccgaccagccggccgcggtgccccgcgtgacgctggggaccggtcggcagctgtcagtgctggaggtgsgcgcctacaagcgctggcaggacgtgtccatgcgccgcatggagatgatcagtgacttctgcgagcggcgcttcctcagcgaggtggattacctggtgtg

SEQ ID NO: 170 - DNA, 201 bp, Homo sapiens
cgcgtctcgttgccaaggatggtctacccccagccaaaggtgctgacaccgtgtaggaaggatgtcctcgtggtgaccccttggctggctcccattgtctmggagggcacattcaacatcgacatcctcaacgagcagttcaggctccagaacaccaccattgggttaactgtgtttgccatcaagaaatacgtggctttc

SEQ ID NO: 171 - DNA, 201 bp, Homo sapiens
ggcccgccgtcctgaggaagctgaggttcactgcggtgcccaagaaccaccaggcggtccggaacccgtgagcggctgccaggggctctgggagggctgcrggcagccccgtccccctcccgcccttggttttagcagaacgggtaaactctgtttcctttgtccgtcctgttgtgagtaactgaagcctaggccccgtcc

SEQ ID NO: 172 - DNA, 201 bp, Homo sapiens
ggcttctacggaagcagccgggaggccttcacctacgagcgccggccccagtcccaggcctacatccccaaggacgagggcgatttctactacctgggggsgttcttcggggggtcggtgcaagaggtgcagcggctcaccagggcctgccaccaggccatgatggtcgaccaggccaacggcatcgaggccgtgtggcac

SEQ ID NO: 173 - DNA, 201 bp, Homo sapiens
tgcagcggctcaccagggcctgccaccaggccatgatggtcgaccaggccaacggcatcgaggccgtgtggcacgacgagagccacctgaacaagtacctrctgcgccacaaacccaccaaggtgctctcccccgagtacttgtgggaccagcagctgctgggctggcccgccgtcctgaggaagctgaggttcactgcgg

SEQ ID NO: 174 - DNA, 201 bp, Homo sapiens
cagcgaggtggattacctggtgtgcgtggacgtggacatggagttccgcgaccacgtgggcgtggagatcctgactccgctgttcggcaccctgcaccccrgcttctacggaagcagccgggaggccttcacctacgagcgccggccccagtcccaggcctacatccccaaggacgagggcgatttctactacctgggggg

SEQ ID NO: 175 - DNA, 201 bp, Homo sapiens
tgccaaggatggtctacccccagccaaaggtgctgacaccgtgtaggaaggatgtcctcgtggtgaccccttggctggctcccattgtctgggagggcacrttcaacatcgacatcctcaacgagcagttcaggctccagaacaccaccattgggttaactgtgtttgccatcaagaaatacgtggctttcctgaagctgt

SEQ ID NO: 176 - DNA, 201 bp, Homo sapiens
gaacagagctacactggactcgggcacattcggagcagcatcctttagtatggaggctacttctcaggtaaccaggaattgaggggaaggaccttgtggargccgagcattaacagcaagagcggggtttggagaaagtctgagattgggtgcagccctgacttacctgctggccctgaccagtttcttttcactaacttg

SEQ ID NO: 177 - DNA, 201 bp, Homo sapiens
ttactgccccggggtcctttcctctgggtgttggggcacagggtgctatgggaggcccatttgcttccctctcggagctcagtttttgcttcatgggtcaraatgtgggctggccaagtggttacaggaacagggtttcggtaagctatgttgtctttttttttttttttttttttttttttaatggtttgattttgtgct

SEQ ID NO: 178 - DNA, 201 bp, Homo sapiens
ataaggaaaagaagtgtagctatacagaggatgctcagtgtatagatggcactatcgaagtccccaaatgcttcaaggaacacagttctctggctttttgsaaaactgatgcatccgatgtaaagccatgctaaggtggttttcagattccacacaaaatgtcacacttgtttcttgttcatccaaggaacctaattgaaa

SEQ ID NO: 179 - DNA, 128 bp, Homo sapiens
ggctctgtctttttagcagacgaaaacmactttggtagtgccagtgtgactcatccacaatgatttctccagtgctcatcttgttctcgagttttctctgccatgttgctattgcaggacggacctgt

SEQ ID NO: 180 - DNA, 201 bp, Homo sapiens
aaatgactttgcacctgcaaatggtgcttcaatgtcgttttgtatctttaagctgtgatgttgtatatatacaatgcctcccagctagactgtaagccctytggggacaagggctgcttccagttcttggatggcgttctcctatctaccttccttcaactgctctgcatataataagcactcaataaatgctcatttgcc

SEQ ID NO: 181 - DNA, 201 bp, Homo sapiens
tcaattctgggatttggcagctttgctgtgaaagcccaatggacagaggactgcagaaaatcaacctatcctccttcaggaccaactgtcttccctgctgrtataaggtacagaggtgcagttccatggtacaccataaatcttgacttaccaccctacaaaagatggcatgaattgatgcttgacaaggcaccagtgcct

SEQ ID NO: 182 - DNA, 110 bp, Homo sapiens
gtagggggccactcatattctgggctcctggaaccaatcccgtgaaagaattatttttgtgtttctaaaactatggttcccaataaaagtgactctcagcraaaaaaaaa

SEQ ID NO: 183 - DNA, 201 bp, Homo sapiens
acccgccctggggaggcgcgcagcagaggctccgattcggggcaggtgagaggctgactttctctcggtgcgtccagtggagctctgagtttcgaatcggyggcggcggattccccgcgcgcccggcgtcggggcttccaggaggatgcggagccccagcgcggcgtggctgctgggggccgccatcctgctagcagcctc

SEQ ID NO: 184 - DNA, 201 bp, Homo sapiens
tgaaataaaccaccccaaaacttagtgttaaaagagcaaccaaaaaaaatttatgtgagattatggatttgttacttagcttgatttaatcatcctgtaaygtgtacatatatcaaaatgttatgtataccataaatatataaaattttatcaacgaaattcataacaatctctcagaccacagagaaatcaaattagaac

SEQ ID NO: 185 - DNA, 201 bp, Homo sapiens
agaaactaccagagttacctgttgcccataccagtggggtaagccctatgaatgtatatgagagtttcaaacatccacaaaacattggctttctaatattygtattcccactattcctttcttttcatgattcatgtcattgtcccatcaacatttctaagatttccattccgttaagagcaaaagagaatgttggaaggt

SEQ ID NO: 186 - DNA, 201 bp, Homo sapiens
tatcgacttgcagaaaaccagaagtcctgtgaaccagcagtgccatttccatgtggaagagtttctgtttcacaaacttctaagctcacccgtgctgagartgtttttcctgatgtggactatgtaaattctactgaagctgaaaccattttggataacatcactcaaagcacccaatcatttaatgacttcactcgggtt

SEQ ID NO: 187 - DNA, 201 bp, Homo sapiens
ccttttaccctccatggtcgttaaaggagagatggggagcatcattctgttatacttctgtacacagttatacatgtctatcaaacccagacttgcttccrtagtggagacttgcttttcagaacatagggatgaagtaaggtgcctgaaaagtttgggggaaaagtttctttcagagagttaagttattttatatatata

SEQ ID NO: 188 - DNA, 201 bp, Homo sapiens
aggcatctctggatacacattaaggttgtgtaaaatggataatgagtgtaccaccaaaatcaagcccaggatcgttggaggaactgcgtctgttcgtggtyagtggccgtggcaggtgaccctgcacacaacctcacccactcagagacacctgtgtggaggctccatcattggaaaccagtggatattaacagccgctca

SEQ ID NO: 189 - DNA, 201 bp, Homo sapiens
cggttgcttgttttttaccttcttttcccaggaatggcccaaagaatctcaaagaaatctttgtctccttaaaacatctgagagtggattgcccagtacargcattaaaaagagcaaagctctttctggtttcagtctacaaagctgcaggcacagcatcccagtgttctgccattcttcattttaccatgacactgattt

SEQ ID NO: 190 - DNA, 201 bp, Homo sapiens
ccaaaactcccgttctatgatcgttgtagtttgtttgagcattcagtctctttgtttttgatcacgcttctatggagtccaagaattaccataaggcaatrtttctgaagattactatataggcagatatagcagaaaataaccaagtagtggcagtggggatcaggcagaagaactggtaaaagaagccaccataaatag

SEQ ID NO: 191 - DNA, 201 bp, Homo sapiens
tgtttgagcattcagtctctttgtttttgatcacgcttctatggagtccaagaattaccataaggcaatatttctgaagattactatataggcagatatascagaaaataaccaagtagtggcagtggggatcaggcagaagaactggtaaaagaagccaccataaatagatttgttcgatgaaagatgaaaactggaaga

SEQ ID NO: 192 - DNA, 201 bp, Homo sapiens
agggagcatgctcaaacctccctaagacaagctgctgctgtgactatgggctcccaaagagctagatcgtatatttatttgacaaaaatcaccatagactrcatccatactacagagaaaaaacaattagggcgcaaatggatagttacagtaaagtcttcagcaagcagctgcctgtattctaagcactgggattttctg

SEQ ID NO: 193 - DNA, 201 bp, Homo sapiens
aagatgaaaactggaagaaaggagaacaaagacagtcttcaccattttgcaggaatctacactctgcctatgtgaacacatttcttttgtaaagaaagaawttgattgcatttaatggcagattttcagaatagtcaggaattcttgtcatttccattttaaaatatatattaaaaaaaatcagttcgagtagacacgagc

SEQ ID NO: 194 - DNA, 118 bp, Homo sapiens
aggcacacaggcaaaatsaagttctacatctgtccctgtgtatgtcacttgtttgaatacgaaataaaattaaaaaaataaattcagtgtattgagaaagcaagcaattctctcaagg

SEQ ID NO: 195 - DNA, 101 bp, Homo sapiens
rgcaatcctttctttcagctggagtgctcctcaggagccagccccacccttagaaaagatgttttccatgaggatcgtctgcctggtcctaagtgtggtgg

SEQ ID NO: 196 - DNA, 201 bp, Homo sapiens
tataaagatataccaagggccattcagtacatcaggaaagtggcagacagaagcttctctctgcaaccttgaagactattggtttgagaacttctcttccyataccacccaaaatcataatgccattggaaagcaaaaagttgttttatccatttgatttgaattgttttaagccaatattttaaggtaaaactcactgaa

SEQ ID NO: 197 - DNA, 101 bp, Homo sapiens; identical to SEQ ID NO: 195

SEQ ID NO: 198 - DNA, 201 bp, Homo sapiens
ttcttaaattcaaattttttagctggagtaaaaatggtcccagtaccatttcctgttcccttcactataacctacatttttgtcacattaagtttttcccyattccaggacaggtcaggccctttaaaaatttcaacagctttattgagatataattgatataatttaaaaaatcctgcacatgtgtcatgctggagccct

SEQ ID NO: 199 - DNA, 201 bp, Homo sapiens
aaaggaaaaactgatgtttaaaagtccacttttaaaactatatttatttatgtaggatctgtcaaagaaaacttccaaaaagatttattaattaaaccagmctctgttgcaataagttaatgttttcttgttttgtaatccacacattcaatgagttaggctttgcacttgtaaggaaggagaagcgttcacaacctcaaa

SEQ ID NO: 200 - DNA, 201 bp, Homo sapiens; identical to SEQ ID NO: 198

SEQ ID NO: 201 - DNA, 201 bp, Homo sapiens; identical to SEQ ID NO: 199

SEQ ID NO: 202 - DNA, 201 bp, Homo sapiens
ccacctggggggagccaaacaggtcagaccagagcaccctgcggaaacagaatatgactcactttaccctgaggatgatttgtagaaaattaactgctaayttctattgacccacaaagtttcagaaattctctgaaagtttcttccttttttctcttactatatttattgatttcaagtcttctattaaggacatttagc

SEQ ID NO: 203 - DNA, 159 bp, Homo sapiens
ctgtgcttatcgcctggatctatcattactgcaaaaacctgctctgttgtgctggctggcaggccctgtggctgctggctgagggttctgctgtcctgtgscaccccattaaagtgcagttccctccggaaaaaaaaaaaaaaaaaaaaaaaaaaaaaa

SEQ ID NO: 204 - DNA, 159 bp, Homo sapiens; identical to SEQ ID NO: 203

SEQ ID NO: 205 - DNA, 159 bp, Homo sapiens; identical to SEQ ID NO: 203

SEQ ID NO: 206 - DNA, 201 bp, Homo sapiens
gcaatttttacaacctgagttcaagtcaaattctgagcctggggggtcctcatctgcaaagcatggagagtggcatcttctttgcatcctaaggacgaaaracacagtgcactcagagctgctgaggacaatgtctggctgaagcccgctttcagcacgccgtaaccaggggctgacaatgcgaggtcgcaactgagatct

SEQ ID NO: 207 - DNA, 201 bp, Homo sapiens
ttcttaagattatctatggatggttctccaactaggattgcgtatgggacacaagggagctctggttactctttgagattgtgtaacactggggacaactktgtctgcacaacaaaaacaagcacacgcattgttggaggaacaaactcttcttggggagagtggccctggcaggtgagcctgcaggtgaagctgacagct

SEQ ID NO: 208 - DNA, 201 bp, Homo sapiens
agaaaggtgaaatccaaaatattctacaaaaggtaaatattcctttggtaacaaatgaagaatgccagaaaagatatcaagattataaaataacccaacgratggtctgtgctggctataaagaagggggaaaagatgcttgtaagggagattcaggtggtcccttagtttgcaaacacaatggaatgtggcgtttggtgg

SEQ ID NO: 209 - DNA, 201 bp, Homo sapiens
ttataaaataacccaacggatggtctgtgctggctataaagaagggggaaaagatgcttgtaagggagattcaggtggtcccttagtttgcaaacacaatygaatgtggcgtttggtgggcatcaccagctggggtgaaggctgtgcccgcagggagcaacctggtgtctacaccaaagtcgctgagtacatggactggat

SEQ ID NO: 210 - DNA, 201 bp, Homo sapiens
gccttatttttgcatctcacaaacataagtgcaatagatcttttcattgaacagcaaagtaggattcatcattccatatgacttgagttacaccagacctrttctgcccaatgcctttttgattacagtgtagcttgcccaccgcatttgtcgttttagatactttgctagccggccactttggatttcatcagacagtcc

SEQ ID NO: 211 - DNA, 201 bp, Homo sapiens; identical to SEQ ID NO: 210

SEQ ID NO: 212 - DNA, 201 bp, Homo sapiens; identical to SEQ ID NO: 210

SEQ ID NO: 213 - DNA, 201 bp, Homo sapiens
atcagttagggctgtggttttacatccaagacattacacatttgcatctggttctccagataacataaagcagtggaaattccctgatggaagtttcattwaaaatctttccggtcataatgctattattaacacattgacggtaaattctgatggagtgcttgtatctggagctgacaatggcaccatgcatctttggga

SEQ ID NO: 214 - DNA, 201 bp, Homo sapiens
gaaggagagacactcatgcatgaatgtccagactacataaccggtggccccaactcctgccactttggcaagcagtacacctccatgtggaggacatacaycatgatggtcaatgccactaaccagatgggaagcagtttctcggatgaactttatgtggacgtgacttacatagttcagccagaccctcctttggagctg

SEQ ID NO: 215 - DNA, 145 bp, Homo sapiens
atggattaactcgaactccaggctgtcatggcggcaggacggcgwacttgcagtatctccacgacccgcccctacaggtgccagtgcctccagaatgtggcagctcacaagcctcctgctgttcgtggccacctggggaatttcc

SEQ ID NO: 216 - DNA, 201 bp, Homo sapiens
cccctggcaggtggtcctgctggactcaaagaagaagctggcctgcggggcagtgctcatccacccctcctgggtgctgacagcggcccactgcatggatyagtccaagaagctccttgtcaggcttggagagtatgacctgcggcgctgggagaagtgggagctggacctggacatcaaggaggtcttcgtccaccccaa

SEQ ID NO: 217 - DNA, 201 bp, Homo sapiens
gccttgaggagtgtgagaatcaaaactctcctacacttccattaacttagcatgtgttgaaaaaaaagtttcagagaagttctggctgaacactggcaacracaaagccaacagtcaaaacagagatgtgataaggatcagaacagcagaggttcttttaaaggggcagaaaaactctgggaaataagagagaacaactac

SEQ ID NO: 218 - DNA, 201 bp, Homo sapiens
tgacctgagacagaggcagcagtgatacccacctgagagatcctgtgtttgaacaactgcttcccaaaacggaaagtatttcaagcctaaacctttgggtkaaaagaactcttgaagtcatgattgcttcacagtttctctcagctctcactttggtgcttctcattaaagagagtggagcctggtcttacaacacctcca

SEQ ID NO: 219 - DNA, 201 bp, Homo sapiens
gcaaggcatgatgttaaccagaataaagttctgagtgtttttactacagttgttttttgaaaacatggtagaattggagagtaaaaactgaatggaaggtytgtatattgtcagatattttttcagaaatatgtggtttccacgatgaaaaacttccatgaggccaaacgttttgaactaataaaagcataaatgcaaaca

SEQ ID NO: 220 - DNA, 201 bp, Homo sapiens
tgtgagaatcaaaactctcctacacttccattaacttagcatgtgttgaaaaaaaagtttcagagaagttctggctgaacactggcaacaacaaagccaasagtcaaaacagagatgtgataaggatcagaacagcagaggttcttttaaaggggcagaaaaactctgggaaataagagagaacaactactgtgatcaggc

SEQ ID NO: 221 - DNA, 201 bp, Homo sapiens
cagcttccatttcgcccctcatttatccctcaacccccagcccacaggtgtttatacagctcagctttttgtcttttctgaggagaaacaaataagaccayaaagggaaaggattcatgtggaatataaagatggctgactttgctctttcttgactcttgttttcagtttcaattcagtgctgtacttgatgacagacac

SEQ ID NO: 222 - DNA, 201 bp, Homo sapiens
ggccagggcagtgccaaggagctgtcccctgccgccttggagaaaaggcggcggagaaagcaggaacgggaccggaagaagaggaagcgaaaggagctgcyggcgaaagagaaggccaggaaggctgaggaggccacggaggcccaggaggtggtggaggcaaccccagagggggcctgcacggagccgcgggagccgccc

SEQ ID NO: 223 - DNA, 201 bp, Homo sapiens
aagcaatttttggttctgaagatgtaggctctagctcctacgttgctgtggacatattgattgctgtaggtgccatcatcatgattctgggcttcctgggstgctgcggtgctataaaagaaagtcgctgcatgcttctgttgtttttcataggcttgcttctgatcctgctcctgcaggtggcgacaggtatcctaggag

SEQ ID NO: 224 - DNA, 201 bp, Homo sapiens
ttttattttaaagtagaaatctgtccgcttttcacttacggaggccttacagtgtgtgttctgtgttacttgagtttatacgcactgcagaatttgtttaycctgctcttttggaaacgtattccggaagcgaaaccctgagtaatcggaagtggttaggagtgagagagctgctggatatgcggagggactgggcgggtc

SEQ ID NO: 225 - DNA, 201 bp, Homo sapiens
aagcactgcctttacttcagtgggaatctcggcctcagcctgcaagccaagtgttcacagtgagaaaagcaagagaataagctaatactcctgtcctgaamaaggcagcggctccttggtaaagctactccttgatcgatcctttgcaccggattgttcaaagtggaccccaggggagaagtcggagcaaagaacttacca

SEQ ID NO: 226 - DNA, 201 bp, Homo sapiens
gcaggccccagatatagccccatgctgtcctcctaccccagagcacactgttcaggctacttccactggtactgaaatccagtatttcacttactcttttyctttccaatatcctcatgacattcaatatttcacttactctaggtcctccctgcctaaggcccaagtcaactttctgtccagtgggatttgtaatccaat

SEQ ID NO: 227 - DNA, 201 bp, Homo sapiens
gtacttcaaaataataacaacttaagtcaataaataaatgtaaggaagtccaaatgttcacctgaagacaactgtggtcattttttggcaatcccaggttytcttttctacctgtttgctcaatcgtggtctccctctccctctcttgttggggcccatgcccctgctttactgttgccagaggcttgtacttgtttgcct

SEQ ID NO: 228 - DNA, 201 bp, Homo sapiens; identical to SEQ ID NO: 225

SEQ ID NO: 229 - DNA, 201 bp, Homo sapiens; identical to SEQ ID NO: 226

SEQ ID NO: 230 - DNA, 201 bp, Homo sapiens; identical to SEQ ID NO: 227

SEQ ID NO: 231 - DNA, 201 bp, Homo sapiens
tggtaaaacaagcattcaagcacttttacaaaattaccaaattcttaaaatgaagccacagctagacttgcatttcaggtattaaaattgctttcttaackgtcaagaatcacaaaataacaaatcatattatgagtgaatatggggagggcggggccaatcagtcaatgataatctgaacaaattttaagagcagatttt

SEQ ID NO: 232 - DNA, 201 bp, Homo sapiens
cctgggcaacaaagtgagactccatctcaaaaaaaaaaaaaaaaaaaaaaaaaaaaaaagaagaagaaaccctgagccattaatgtgtctcgtaacttgakgaagttcatgaattctctgggcttcatccattaagattcatccttatgctcctgcaagtttcttatatttatgtatttctattctgatttctgaaatgat

SEQ ID NO: 233 - DNA, 201 bp, Homo sapiens
gtgagtggtgtcctttggaggcatggtggatgaaaggcgcaaaggaagcaagaggttaaagataatggcccattagatacaacagcaagcccaagattccraagaagacagacaactccccctagtaccacctagacattactttttaaagacattttacattattgtccagcagaaaaaggctgtcttggaccatgaaac

SEQ ID NO: 234 - DNA, 201 bp, Homo sapiens
ttgattaggaagcatttggtagaaggactgaacaactgttgggatatatatatatatatataattttttttttttaaattcctggtggatactgtagaagmagcccatatcacatgtggatgtcgagacttcacgggcaatcatgagcaagtgaacactgttctaccaagaactgaaggcatatgcacagtcaaggtcact

SEQ ID NO: 235 - DNA, 201 bp, Homo sapiens
tgtgtgcagtatgtgcagaaacatatttccgcggaaaacacgaaagggagccaaacaagccgctcctacacttcgctggtcctgggcgtcctggtgggcartttcatcattgctggtgtggctgtaggcatcttcctgtgcacaggtggacggcgatgttaattactctccagccccctcagaaggggctggattgatgga

SEQ ID NO: 236 - DNA, 201 bp, Homo sapiens
ggtcctgggcgtcctggtgggcagtttcatcattgctggtgtggctgtaggcatcttcctgtgcacaggtggacggcgatgttaattactctccagccccstcagaaggggctggattgatggaggctggcaagggaaagtttcagctcactgtgaagccagactccccaactgaaacaccagaaggtttggagtgacagc

SEQ ID NO: 237 - DNA, 201 bp, Homo sapiens
tgaaacagtggttgccaaaagtggagcgaggatgatttcactaggcatttggcaattcttagagacatttccggttgtcacaattggagggatactagtarcatgaattgggtagaggccagggatgttgctaaatagattataatacacaaggaaagcagcctcaaagaattacccctcccaaaatgtcagaagtgctga

SEQ ID NO: 238 - DNA, 201 bp, Homo sapiens
tggcctcccttcccccacttcctggtccctgtccactcctcaggttggtgctctcacttcttgaaagctctaggcacccccgcctcccgccaggctccccrttggctcctggcaggccagctgagaatgaacaggagatggaggcaggcagcccaggctgcagaggtgagggatgtggggccaggcccagagggctcagcc

SEQ ID NO: 239 - DNA, 201 bp, Homo sapiens
actctgaggccgactcaatctctcggctggaagcagtgttttcccagagcttggcccttgctgacctcgctcactgggcccatcttcccacactgctcttrgaaggacacccctaccggtagcagccccaagctgagggggctccctttttgaccttcactggcccgcccttcactgtctccagcaggagttcctagggct

SEQ ID NO: 240 - DNA, 201 bp, Homo sapiens
agacctgcctttggggggcgtgcatgtgttggtgctgacctccaggccgagatgtgcaacactcaggcctgcgagaagacccagctggagttcatgtcgcsacagtgcgccaggaccgacggccagccgctgcgctcctcccctggcggcgcctccttctaccactggggtgctgctgtaccacacagccaaggggatgct

SEQ ID NO: 241 - DNA, 201 bp, Homo sapiens; identical to SEQ ID NO: 240

SEQ ID NO: 242 - DNA, 201 bp, Homo sapiens; identical to SEQ ID NO: 240

SEQ ID NO: 243 - DNA, 201 bp, Homo sapiens
ctttacaaaaatgcagtattatctatactcagactgaggtgctgggatggcgagcaggggaccccacagcactgtccccagggaattcaagtcctgtgacygccagtgacttactccgtttccttggggcttttcccacctcaacctgtattgtttctttttcataaataaattcagcattatagtatcattaaaagaagc

SEQ ID NO: 244 - DNA, 201 bp, Homo sapiens
attaaccccagcccctctgtcttctgttaagtacagttgatactgacattgttcactcatcaaaccacatcttgatgctaagtaacatttcccatgagccwcaaaactgaatgctgaaaagctactagactggaaaacaaacactgcattatgtatgttaagtgactaatttaatttcaattaaaaagcgtaaagtgaaaa

SEQ ID NO: 245 - DNA, 201 bp, Homo sapiens
tcttctagttctcagatgtctcccctttccttatatggtgaaaactctaatagtctctcttcagcggagccactgaaggaagataagcctgtcactggtcytaggaacaagactgaaaatggactgactccaaagaaaaaaattcaggtgaattcaaaaccttcaattcagcccaagcctttattgcttccagcagcaccc

SEQ ID NO: 246 - DNA, 201 bp, Homo sapiens
catcctcaaggaaatttctcctcttctctccatggaggctatggcatttgttactgaagagaggaaacttacccaagaaaccacttatccaaatacttacytttttgacttgtttggaggtgttgatcttcttgtagaaattcttatgaggcctacgatctctatccggggacagaaactgaaaataagtgatgaaatgtc

SEQ ID NO: 247 - DNA, 201 bp, Homo sapiens
ctgggcaggggtggtgggtaccagagaatgctgccttcccccaagcctgcccctctgcctcattttcctgtagctcctctggttctgtttgctcattggcygctgtgttcatccaagggggttctcccagaagtgaggggcctttccctccatcccttggggcacggggcagctgtgcctgccctgcctctgcctgaggca

SEQ ID NO: 248 - DNA, 201 bp, Homo sapiens; identical to SEQ ID NO: 246

SEQ ID NO: 249 - DNA, 201 bp, Homo sapiens; identical to SEQ ID NO: 247

SEQ ID NO: 250 - DNA, 201 bp, Homo sapiens
tttccggaggacaggaggcccaggaaggtgtccccagtgaaggtgacagccctgggcggtgggaagttggaagccacgttcaccttcatgagggaggatcmgtgcatccagaagaaaatcctgatgcggaagacggaggagcctggcaaatacagcgcctatgggggcaggaagctcatgtacctgcaggagctgcccagg

SEQ ID NO: 251 - DNA, 201 bp, Homo sapiens
cggggtttctggcagaggactggcacagccggaggaagcgcctgcggcacaggggcagggctgtgcagaggccgcttccgcccctcccgcccctcccgcawacccggaaatcacacgggggtcaggatggaggccgacaggatgttcacagccgcgggttatgttcatgaccgctgaaccccaggcacggtcgtatccaag

SEQ ID NO: 252 - DNA, 201 bp, Homo sapiens
ggaacctctgtgacccccagccggttaccaacagaaccaccttccccggtagcagaattctcagaagccaccgctgaactgaccgtctcattcacaaacgragtcttcacaactgagacttctaggagtatcaccgccagtccaaaggagtcagactctccagctggtgagtcctgcccgccagtactacaccaagggcaa

SEQ ID NO: 253 - DNA, 201 bp, Homo sapiens
ccaccttccccggtagcagaattctcagaagccaccgctgaactgaccgtctcattcacaaacgaagtcttcacaactgagacttctaggagtatcaccgrcagtccaaaggagtcagactctccagctggtgagtcctgcccgccagtactacaccaagggcaacctggtccggatatgcctcggggctgtgatcctaat

SEQ ID NO: 254 - DNA, 201 bp, Homo sapiens
agggacccatacctgtggtcagcccccagcgaccccctggagcttgtggtcacaggaacctctgtgacccccagccggttaccaacagaaccaccttcccyggtagcagaattctcagaagccaccgctgaactgaccgtctcattcacaaacgaagtcttcacaactgagacttctaggagtatcaccgccagtccaaag

SEQ ID NO: 255 - DNA, 201 bp, Homo sapiens
gaggactggcacagccggaggaagcgcctgcggcacaggggcagggctgtgcagaggccgcttccgcccctcccgcccctcccgcagacccggaaatcacmcgggggtcaggatggaggccgacaggatgttcacagccgcgggttatgttcatgaccgctgaaccccaggcacggtcgtatccaagggagggatcatggc

SEQ ID NO: 256 - DNA, 201 bp, Homo sapiens
gacgtaaccctacagtgtcagactcggtatggctttgaccaatttgctctgtacaaggaaggggaccctgcgccctacaagaatcccgagagatggtacamggctagttttcccatcatcacggtgaccgccgcccacagcggaacctaccgatgctacagcttctccagcagggacccatacctgtggtcagcccccagc

SEQ ID NO: 257 - DNA, 201 bp, Homo sapiens
acagtgtcagactcggtatggctttgaccaatttgctctgtacaaggaaggggaccctgcgccctacaagaatcccgagagatggtacagggctagttttyccatcatcacggtgaccgccgcccacagcggaacctaccgatgctacagcttctccagcagggacccatacctgtggtcagcccccagcgaccccctgga

SEQ ID NO: 258 - DNA, 201 bp, Homo sapiens
agggggctgaggtgggagaatggcttgagcctgggaggcagaggttgcagtgagctgagatcacaccactgcactctagctcgggtgacgaagcctgactytgtctcaaaaaatacagggatgaatatgtcaattaccctgatttgatcatagcacgttgtatacatgtactgcaatattgctgtccaccccataaatatg

SEQ ID NO: 259 - DNA, 201 bp, Homo sapiens
gcctctttcttcaacctctctaatatgggctccagacggatctctaaggttcccagctctcagggttgactctgttccatcctctgtgcaaaatcctcccytgcttccctttggccctctgtgctcttgtctggttttccccagaaactctcaccctcactccatctcccactgcggtctaacaaatctcctttcgtctct

SEQ ID NO: 260 - DNA, 201 bp, Homo sapiens; identical to SEQ ID NO: 251

SEQ ID NO: 261 - DNA, 201 bp, Homo sapiens
ggaacctctgtgacccccagccggttaccaacagaaccaccttccccggtagcagaattctcagaagccaccgctgaactgaccgtctcattcacaaacgragtcttcacaactgagacttctaggagtatcaccgccagtccaaaggagtcagactctccagctggtcctgcccgccagtactacaccaagggcaacctg

SEQ ID NO: 262 - DNA, 201 bp, Homo sapiens
ccaccttccccggtagcagaattctcagaagccaccgctgaactgaccgtctcattcacaaacgaagtcttcacaactgagacttctaggagtatcaccgrcagtccaaaggagtcagactctccagctggtcctgcccgccagtactacaccaagggcaacctggtccggatatgcctcggggctgtgatcctaataatc

SEQ ID NO: 263 - DNA, 201 bp, Homo sapiens; identical to SEQ ID NO: 254

SEQ ID NO: 264 - DNA, 201 bp, Homo sapiens; identical to SEQ ID NO: 255

SEQ ID NO: 265 - DNA, 201 bp, Homo sapiens; identical to SEQ ID NO: 256

SEQ ID NO: 266 - DNA, 201 bp, Homo sapiens; identical to SEQ ID NO: 257

SEQ ID NO: 267 - DNA, 201 bp, Homo sapiens
cagggggctgaggtgggagaatggcttgagcctgggaggcagaggttgcagtgagctgagatcacaccactgcactctagctcgggtgacgaagcctgacyttgtctcaaaaaatacagggatgaatatgtcaattaccctgatttgatcatagcacgttgtatacatgtactgcaatattgctgtccaccccataaatat

SEQ ID NO: 268 - DNA, 201 bp, Homo sapiens
ggcctctttcttcaacctctctaatatgggctccagacggatctctaaggttcccagctctcagggttgactctgttccatcctctgtgcaaaatcctccygtgcttccctttggccctctgtgctcttgtctggttttccccagaaactctcaccctcactccatctcccactgcggtctaacaaatctcctttcgtctc

SEQ ID NO: 269 - DNA, 201 bp, Homo sapiens
aaaaaccctggacgcggtatgtagacatagcattgcgcacagacatgtctgacatcaccaaatcctacctgagtgagtgtggctcctgcttctgggtgggsgaatctgaagagaaggtggtgggcacagtaggagctctgcccgttgatgatcccaccttgagggagaagcggttgcagctgtttcatctctctgtggaca

SEQ ID NO: 270 - DNA, 201 bp, Homo sapiens
tcaacgacgtgaatgaccactcgccccgctttcccctcgactccctgcaactcgacgtctccgagctcagcccgccagggaccgccttccgcctgccagtkgcccacgatccggacgccggactgttcagcactcagggctacaccctggtgcaaccgtccgacctgcccaaggaccccgcaggcccgttcttccagttgc

SEQ ID NO: 271 - DNA, 201 bp, Homo sapiens
ggagaaggaagatgaggccacaggggagcttggtgtgggtcttggagacgggagcatctctctgtccttggaaggcggagagggagacttcgcgttgctarccggcggccccccaggggtatttttcctttgcgtggaggggcccctggacagagagagccgcgatctgtatgagttactactggtggccacggacgcggg

SEQ ID NO: 272 - DNA, 201 bp, Homo sapiens
gtctccgagctcagcccgccagggaccgccttccgcctgccagttgcccacgatccggacgccggactgttcagcactcagggctacaccctggtgcaacygtccgacctgcccaaggaccccgcaggcccgttcttccagttgcgctaccggactccggggccactaccgtcaccgcttttgccaggctcctcgtcaccc

SEQ ID NO: 273 - DNA, 201 bp, Homo sapiens; identical to SEQ ID NO: 270

SEQ ID NO: 274 - DNA, 201 bp, Homo sapiens; identical to SEQ ID NO: 271

SEQ ID NO: 275 - DNA, 201 bp, Homo sapiens; identical to SEQ ID NO: 272

SEQ ID NO: 276 - DNA, 201 bp, Homo sapiens
gagcagagcatgcagtgatggaagaagcaggaaaagcaagaagaaaagacagcagcatcaagaggaggaggacatcttggatgtaagggatgagaaggatrgcggggctagggaagcagagagcagagcacacactggctcaagcagcagaggtaagaggaagaggcagcagcatcccaagaaggaaagagctggagtcag

SEQ ID NO: 277 - DNA, 201 bp, Homo sapiens
ggagttgaagcctcaaagaccagggttgatgcaggtctgcaggtcttctgcacccccctcaatgaggagtccctcccagaaaggaaactgatctctgggaygtcagctgctgagaggagcaagcggtagtaccaccccttagttgagggagtcagcacagtcctttctgcagcttctaacccaggaccatgaactcaggtg

SEQ ID NO: 278 - DNA, 201 bp, Homo sapiens; identical to SEQ ID NO: 276

SEQ ID NO: 279 - DNA, 201 bp, Homo sapiens; identical to SEQ ID NO: 277

SEQ ID NO: 280 - DNA, 201 bp, Homo sapiens
ccgtcagcctgacgacagcagtccaggattacgtgtgccctctgcaaggaagccacgccctgtgcacctgctgcttccagcccatgcccgaccggagagcygagcgcgagcaggacccgcgtgtcgcccctcagcagtgtgcggtctgcctgcagcctttctgccacctgtactggggctgcacccggaccggctgctacg

SEQ ID NO: 281 - DNA, 201 bp, Homo sapiens
ctggggtgactcttctgtggagctttaccctctgagtgagaccctccccagagccccgggggccgcagcccgccctcctggtgagcgctgggcagggctcrtggtggcatcagcagcagagacgaagcctttctgtaacatgcggccgtcccgccgagaggggcagttttgctcttttgtacattttccgaaactacagtt

SEQ ID NO: 282 - DNA, 201 bp, Homo sapiens
gctgctcccttgtgtgagtgaccgcggccccgagcctggggctggacgcaggtcccaggacgtgctgctcccttgtgtgagtgaccacggccccaagcccrgggctggaggcaggtcccaggacgcgccgctccctcatgctgcccgggcccttcctccaagaccctacagagcctgaggggcaccttggcttccgcctgt

SEQ ID NO: 283 - DNA, 201 bp, Homo sapiens
cgtccgtcagcctgacgacagtccaggattacgtgtgccctctgcaaggaagccacgccctgtgcacctgctgcttccagcccatgcccgaccggagagcygagcgcgagcaggacccgcgtgtcgcccctcagcagtgtgcggtctgcctgcagcctttctgccacctgtactggggctgcacccggaccggctgctacg

SEQ ID NO: 284 - DNA, 201 bp, Homo sapiens; identical to SEQ ID NO: 281

SEQ ID NO: 285 - DNA, 201 bp, Homo sapiens; identical to SEQ ID NO: 282

SEQ ID NO: 286 - DNA, 201 bp, Homo sapiens; identical to SEQ ID NO: 280

SEQ ID NO: 287 - DNA, 201 bp, Homo sapiens; identical to SEQ ID NO: 281

SEQ ID NO: 288 - DNA, 201 bp, Homo sapiens; identical to SEQ ID NO: 282

SEQ ID NO: 289 - DNA, 201 bp, Homo sapiens; identical to SEQ ID NO: 280

SEQ ID NO: 290 - DNA, 201 bp, Homo sapiens; identical to SEQ ID NO: 281

SEQ ID NO: 291 - DNA, 201 bp, Homo sapiens; identical to SEQ ID NO: 282

SEQ ID NO: 292 - DNA, 201 bp, Homo sapiens; identical to SEQ ID NO: 280

SEQ ID NO: 293 - DNA, 201 bp, Homo sapiens; identical to SEQ ID NO: 281

SEQ ID NO: 294 - DNA, 201 bp, Homo sapiens; identical to SEQ ID NO: 282

SEQ ID NO: 295 - DNA, 201 bp, Homo sapiens
gcaacctctgtccttcccagatatggtccaccgtgcctatttaaaggacacttgagcaccaaaagtaatgctgcagtagactgctcggttccagtaagcgrgagtaccagcataaagtatgcagaccaacaacgaagagagaaactcaaaaaggaattagcacaatgtgaaaaagagttcaaattaactaaaactgcaatg

SEQ ID NO: 296 - DNA, 201 bp, Homo sapiens
agactaagcactctccagctggtcaagaatcacatggctgttcactataataaaatcctttcagccaaagctgcagtagactgctcggttccagtaagcgrgagtaccagcataaagtatgcagaccaacaacgaagagagaaactcaaaaaggaattagcacaatgtgaaaaagagttcaaattaactaaaactgcaatg

SEQ ID NO: 297 - DNA, 201 bp, Homo sapiens
ggaattctggggagacattgccaaggaattttactggaagactccatgccctggcccattccttcggtacaactttgatgtgactaaagggaaaatcttcrttgagtggatgaaaggagcaactaccaacatctgctacaatgtactggatcgaaatgtccatgagaaaaagcttggagataaagttgctttttactggga

SEQ ID NO: 298 - DNA, 201 bp, Homo sapiens; identical to SEQ ID NO: 297

SEQ ID NO: 299 - DNA, 201 bp, Homo sapiens
aaccaagatcttcaaacgcactgccccaagttttactaaaaatactgacctttctctagaaggcgatccattttctcagcctattaaatttcccataaatygactctcagatgtaaaaaatacttcggaggacagtgaaaacttcccatcaagttctaaaaagtctgaggagtggcctgactggagtgaacctgaggagcc

SEQ ID NO: 300 - DNA, 201 bp, Homo sapiens
tctgcttggaccagaggtggttgtgggaggagaacgaaccaagatcttcaaacgcactgccccaagttttactaaaaatactgacctttctctagaaggcyatccattttctcagcctattaaatttcccataaatggactctcagatgtaaaaaatacttcggaggacagtgaaaacttcccatcaagttctaaaaagtc

SEQ ID NO: 301 - DNA, 201 bp, Homo sapiens
gctgctgtctcacatcgaggcctacgtggagcacttcactcaggagcagctgaagaaagtcatcttgccacaggttttgctgggcctgcgtgatactagcyattccattgtggcaattactctgcatagcctagcagtgctggtctctctgcttggaccagaggtggttgtgggaggagaacgaaccaagatcttcaaacg

SEQ ID NO: 302 - DNA, 201 bp, Homo sapiens
cacgcccatcaacagcaagaagcacatacagcgagattactacaatactcttttacagacaggcgatccattttctcagcctattaaatttcccataaatygactctcagatgtaaaaaatacttcggaggacagtgaaaacttcccatcaagttctaaaaagtctgaggagtggcctgactggagtgaacctgaggagcc

SEQ ID NO: 303 - DNA, 201 bp, Homo sapiens
ctctagcatattccctaaatgtttcttttctggcagcacgcccatcaacagcaagaagcacatacagcgagattactacaatactcttttacagacaggcyatccattttctcagcctattaaatttcccataaatggactctcagatgtaaaaaatacttcggaggacagtgaaaacttcccatcaagttctaaaaagtc

SEQ ID NO: 304 - DNA, 201 bp, Homo sapiens; identical to SEQ ID NO: 301

SEQ ID NO: 305 - DNA, 201 bp, Homo sapiens
tgaccagcgcctggccaaggtgctgacgctgctgcaggcgcggagccgtggccgcctcatgcgccttgagtaccagcgcctgctgggaggcagggatgcgrtgttcaccatccagtggaacatccgtgccttcaatgccgtcaagaactggtcatggatgaagctctttttcaagatgaagccgctgctgcgctcggcgca

SEQ ID NO: 306 - DNA, 201 bp, Homo sapiens
accccaggggtcatggatgccttcttggtgctacaccagctgcgctgcaatggggtcctggaggggatccggatctgccgccaagggttccccaacaggtrgctctacaccgacttccggcagcggtaccgtatcctgaaccccagtgccatcccggatgacaccttcatggacagcaggaaggccacagagaaactgctg

SEQ ID NO: 307 - DNA, 201 bp, Homo sapiens
ctgaccccctgggctctaaagaggaatgtctgctgttgcacatctggctgaggccacctgccccgatcctgccatctctgcatcgccccctgctgccttcrgccttccctgggccctgaataaacaccacagccagtttccttctcattcttttctttggggttcaggaggaaaaacacagtcctagggacaaaagccagg

SEQ ID NO: 308 - DNA, 201 bp, Homo sapiens
gcctcccaaagtgctggaattacagacatgagtggcaataaaaggggtagcagagcttcctgccctcaccgtggtgccgagtgcctgctgccttgggccgrcttgaacctccagggtttccagctcctcctccttcaccccagtgccactgccatgatggatgtgagtgaacttggggagtctgcccgctacctccgccag

SEQ ID NO: 309 - DNA, 201 bp, Homo sapiens
cttaagtgatgtgtccgcctgggcctcccaaagtgctggaattacagacatgagtggcaataaaaggggtagcagagcttcctgccctcaccgtggtgccyagtgcctgctgccttgggccgccttgaacctccagggtttccagctcctcctccttcaccccagtgccactgccatgatggatgtgagtgaacttgggga

SEQ ID NO: 310 - DNA, 201 bp, Homo sapiens
atgggccaaggaggggtcagcggcgaattctttcggcctgttggggacccctcgtgtccccacgccagactggacctcccgtatgaacttctcttcgcatyggcggcggcttccgtcacctccgctcccccgatcctattcccagtcgtatgccagcttggagagtcacgtgagagcaagagagtagctttctggttgtcc

SEQ ID NO: 311 - DNA, 201 bp, Homo sapiens; identical to SEQ ID NO: 310

SEQ ID NO: 312 - DNA, 201 bp, Homo sapiens
agaatcaagaaccggtgaatgataaaagggagcgaaaacttaagttcaaggaccagttagttgatttggaagttcctccactagaagacactactactttyaaaaattattttgaaaacgaaaggaatatgtttgggaaactgtcacaattatgtatttccaatgattttggacaagaagatgtgctcctgtcacttacta

SEQ ID NO: 313 - DNA, 201 bp, Homo sapiens
agcttccccttagtacattgaaattcaaagtcatgcttgtaactgttaatgaaagcagatttaaagcaacaccaccatcactggagtatttttagttatayacgattgagactaccaagcatgttgctcttattcagtgtaatcctaatctcatgggtatccactgttgggggagaaggaacactttgtgattttccaaaa

SEQ ID NO: 314 - DNA, 201 bp, Homo sapiens
tgccagacccccaaaatagcctgcaagaatggcgataaaaactgccaccagagccacggggccgtgtccctgaccatgtgtaagctcacctcagggaagtytccgaactgcaggtacaaagagaagcgacagaacaagtcttacgtagtggcctgtaagcctccccagaaaaaggactctcagcaattccacctggttcct

SEQ ID NO: 315 - DNA, 201 bp, Homo sapiens
tacacaggcaaatatccaagctaccctgattcgcagcagactgagaaaagttcccaggtttaaaaccatgttcagtaacctgatccattatccaagatatyctctatattggagcaagtcagatcctgtcccaccatttatcagtcgggaatggaagggacataaggagaaacacagagaagccctccggcagctcaccac

SEQ ID NO: 316 - DNA, 201 bp, Homo sapiens
gtgtgttcatgcaacagccatagagatggtgctattgaaaggcaatctgcccatcctgtgtattgacaagcatcaggattccaggaggattcttcctgatkcaaagactgtcaaataggaaaaaagaaaacagtaaatgaacaaaaacatcaacatggagtccaagtaatgaatttatagaggaaaatgtatgctactctg

SEQ ID NO: 317 - DNA, 117 bp, Homo sapiens
ttacttataatggcttgagttaaaatgctccaacttttctaatttttgcttttgaaaataaaacacctatagtgacaataaaaacacacatttaaagccawaaaaaaaaaaaaaaaa

SEQ ID NO: 318 - DNA, 201 bp, Homo sapiens
cacggtagcaggcgccgccgtgctgctcaaggactatgtcaccggtggggcttgccccagcaaggccaccatccctgggaagacggtcatcgtgacgggtyccaacacaggcatcgggaagcagaccgccttggaactggccaggagaggaggcaacatcatcctggcctgccgagacatggagaagtgtgaggcggcagc

SEQ ID NO: 319 - DNA, 201 bp, Homo sapiens
gcttcggcctcctgagtagctgggactacagggactatgtcaccggtggggcttgccccagcaaggccaccatccctgggaagacggtcatcgtgacgggygccaacacaggcatcgggaagcagaccgccttggaactggccaggagaggaggcaacatcatcctggcctgccgagacatggagaagtgtgaggcggcag

SEQ ID NO: 320 - DNA, 201 bp, Homo sapiens
ctaactgtggtagtgaccacgtggttctcctcgctgtgtctcggggaacccccaacagggagcggaaacagggagagcagtctctggctccttctccgtcygccagccctgtctgccaccctcctggccatggtgaccaccttgacagggccaagaacagcccacctcaggcaccgagcacccgtgaccatggtagttgga

SEQ ID NO: 321 - DNA, 146 bp, Homo sapiens
gataggcgccgggcagctgagctggtaggaggaccagacggggatkttcggctccgccccccagcgtcccgtggccatgacgaccgctcagagggactccctgttgtggaagctcgcggggttgctgcgggagtccggggatgtgg

SEQ ID NO: 322 - DNA, 201 bp, Homo sapiens
taagggtgacacagaatgtgtaatgcaaatttcatagtaatagtaactttataaaataatattataaaatacaggatttaaacctttctaaatagatcctraaactgtctctcacattatatagtagatgtttgtttataatgtttacaaaacattttggtgaatttcctcaatgttttataaatgtacattttttaagtc

SEQ ID NO: 323 - DNA, 201 bp, Homo sapiens; identical to SEQ ID NO: 322

SEQ ID NO: 324 - DNA, 201 bp, Homo sapiens; identical to SEQ ID NO: 322

SEQ ID NO: 325 - DNA, 201 bp, Homo sapiens
catgctgcaggaatttttagcatgaatgcttgtgaagaaggctttgctactggtggcagagatggttgtattcgtctttgggatttaacttttaaaccaartactgtgattgatctcagggaaacagaccagggatacaaaggtttgtctgtaaggagtgtgtgttggcgaggtgaccacattctagttggaacacaggac

SEQ ID NO: 326 - DNA, 201 bp, Homo sapiens
gggctgcggcaggatgtatgctgaagagtgggcggcatcgggtgggggaagttgtgcaggtgctggagaaaagccggaggcttgccgagaggagcactgaraggcgactgctggggcacctctataacgatctaggcctgggctactcccagctccagctgttcccgctggccgtggaggccttcctgcaggccctgcccc

SEQ ID NO: 327 - DNA, 201 bp, Homo sapiens
tactttcaggatgtacagaacatatattacatttcagacttggaaacatgcttcaattctaattcagcaacattatcgaacatatagagctgcaaaattaraaagagaaaattatatcagacaatggcattctgctgtggttattcaggctgcatataaaggaatgaaagcaagacaacttttaagggaaaaacacaaagc

SEQ ID NO: 328 - DNA, 201 bp, Homo sapiens
tcatgcatcagaaaatagggaactattaaatgtacacagtgccaacgtttcaaaagtttcttttaatgagaaagctgtaactgaaacttcctttaattccytaaatgttaatggccaaagaggagagaatagtaaacttagtcttacccccaactgttcttcaactttgaacattacacaaagccaaatacattttctaag

SEQ ID NO: 329 - DNA, 201 bp, Homo sapiens
tatatgtcagcgtactactcaaactgtggaatgtacgcaaactggttcagtggtattaaattcatcatctgaatctgatgacagttctctggatatgtctwttaaagcatttgatcatgaaaatacttcagagctatacaaagagctcctagaaaatgaaaagaaaaattttcacttggttaggtctgcagttagagacct

SEQ ID NO: 330 - DNA, 201 bp, Homo sapiens
cgcttggcattccttattagtaaatgtaaacattttcagtatgtatagtgtaaagaaatattaaagccaatcatgagtacgtaaagtgatttttgctctcygtgtacaacttttaaaatctgactttgttttaaaaaaacataaactgttcattacattcttcatttttatcatttatagttttatgcatgtaataaacta

SEQ ID NO: 331 - DNA, 201 bp, Homo sapiens
atgagtgagatgatatttcgaagaataaagatgccctggctttggcttgatctctggtaccttatgtttaaagaaggatgggaacacaaaaagagccttcmgatcctacatacttttaccaacagtgtcatcgctgaacgggccaatgaaatgaacgccaatgaagactgtagaggtgatggcaggggctctgccccctcc

SEQ ID NO: 332 - DNA, 201 bp, Homo sapiens
agttatgacaagaataatcattatagtacttttcagattttataacctggagcagattattttaagttgattagtaggttctgttacagtttttcttttgwtcgtgcacttatagtcttcatttaattcctcatagaatcccagtcacctttatatatcatattattggaagagattcatcttcataatctccagtttttt

SEQ ID NO: 333 - DNA, 201 bp, Homo sapiens
ctggctttggcttgatctctggtaccttatgtttaaagaaggatgggaacacaaaaagagccttcagatcctacatacttttaccaacagtgtcatcgctkaacgggccaatgaaatgaacgccaatgaagactgtagaggtgatggcaggggctctgccccctccaaaaataaacgcagggcctttcttgacttgctttt

SEQ ID NO: 334 - DNA, 201 bp, Homo sapiens
atttagtaacccagtaatatctcacttagtttagggttagatctttagttaattcaaccttatagatcatacttatgaaggtgataactgacacgtgttcmctgaattttaatttgataggcaatacatctacccactccattattttttaaaacttcatttaatagtttaaacaagattggttttgttttcaatttttat

SEQ ID NO: 335 - DNA, 201 bp, Homo sapiens
cttccttagccaggctctgacgctgcaggagatctacgccaacgtgactgagatgctgctggccggcgtcgacacgacgtccttcaccttgtcttggactktgtacctcctggcaaggcacccagaagtgcagcagacggtgtaccgggagattgtgaagaatttaggggaaaggcatgttccaactgcagctgatgtccc

SEQ ID NO: 336 - DNA, 201 bp, Homo sapiens
ggccgcatggctctcaacctccagctttcagacactgatgacaatgaaacgtttgatgagctgcacatagagagcagtgatgagaaaagtccttcagacgrgtcattggctgccgacaccgataagtccgtggagaacctggatgtccttgtggggtttggaaaatctctatgtgggtctcctgaagaggaggaaaaacaa

SEQ ID NO: 337 - DNA, 201 bp, Homo sapiens
gacataggattacagactcccaggatctctccttcaacccatgagccactggaaatgacgtcctccaaaagtgtatctccagggagaaaaggacaattgawtgatagcgcctccacaccccccaagccttccttcttaggggtaaatgagtcaccatcatctcaggtcagcagttcctcatcatcctcatcacccgccaaa

SEQ ID NO: 338 - DNA, 92152 bp, Homo sapiens
aatttttgtatctttttgtagagaaggggtttcaccatgttggccaggctggtctcgaactcctgacctcaagtgatccacctgctttggcctcccaaagtgctagtattacaagtgtgagccactgcacctggccaatttgtaactttgatagatatcgtcaaactgcatccattggcaggcaacttatatttctgttggcaatgaataaaagttcctatttctacacagcttcagagtatattttcaaacctttggattagacaattttgtatattatcattgagaatgaacatacgttcatatgcttaaaaccttttgtatttctttctgtaaagggtctcatactctcttttgctgatctttttcttatcaatttctaggagctctttacatattggggatgggagtcattttcctgagatgagttgcaggtatttgttcccagcgtattccttctttttcacattgtggggctccccctaccatgtattactgaattgagttctccccaaattgatctatagatgcaatacattctttatgaaatacaacagcagatattgctatgtggaatctgaggaaccaatttaaaaatttatgtagaaatacaaaggactaaaatagaaccagaagaatcttgaataagaacaaatttggaggacttatgctatgagatgttcagacttatgacgctacaggagtcaaggcagtgaggttgtagtgcacaaaacagacccacagagcaacaaaaacaaatggaggcccgcagggtggggtggctcacacttgtaatctcagcactttgggaggttgaggcaggcggatctcttgaggccaggagttctagaccagcctggccaacatagtgaaacccagtctctactaaaaatacaaaagttagccaggcatggtggcgcatgcctatattcccagctgcttgggaggctaaggcaggagaatcacttgaacctgggaggcggaggttgcagtaagccaagatcatgctactgcactccagcctggggaacagagtgagactctgtctcaaaaaaaaaaaaaaaaaaagaaagaatgaaagaaaaagaaagaaagaaagggaaaaaagagagaaagagagagaatggaggcaacccagaccgaaacatagacatttatgaatcccatgagctgaattcaggaagccagacacatgagagtatattctgaggatgaagcaacatatgaaccacgcagacacattagcagaacgaaagacaaaccccatggtaatgccaactgatgcagaaacagcatgtggccaagattcaacatcctttcacagtaaaaaaaaaaaaaaaacactccacacataggaagaggacggaactgcctcaacacaatgaaggtcgcttatgaaaagctcacttctaacatcatactcaatggtgacaggctgaacgcttttcctccgagagtgggaacaagcaagggtgctggctcttgtcttttctgttcaagtgagtattgaaactcataaccagatgagttaggcgaggaaaagaaagcaaaggcaccaaattggaaagaaagaagtaaaatcatccctgtatgcgggtgacatgatcttatacttagcaaacctcaaagttaccaaaaaagttagaaatgtaaacgaattcagccaagttgctgatacaaaatcagcgttcaaaagtcagttgcctttccatacaccaacaatcaacaatccaaaaggaattaagaaaataatttcaatacagtggcatcaaaaagaataaaatactagtggataaacctaccctacaagctcaaagacttgtacactgaaaactataaaatcttgctgaaagaaattagagaagacacaaataaatggaaagatatcttgtgttcttcaattcaaagactttaatattgtcaaatttccctaccacttgaagtgattcactgcaatttctatcaaaatccaaatggtatttgtttcataaatataaaaattcaccccaaaattcacatggaatctcaaaggaccccaaatagccaagacaatttggaaaaagaacaaagtggaggactcatacttcctgaattcaaaacatattactaaactacagtaatcaaaacagtgtggtactggccaaaggcaaagatatagaccaatggaataaaacagagaacccttgtgtacatatgttcaagcaatcctcaacaatggtgctgagacctgtcactggggaaaggacagtttctccaacaaatggtgctgggaaaaatgatattcatgtgcagaagcataaaggaagacccttgccttacaccacatccaaaaattaactagaaatgaaataaggacctaatggtaatacctgtaactgcacaacctctagaagaaaatacaggaaaatttgaaattgcatatctgacttttcagatatgacaccaaaaacacaggcaaaccaaagcaaaaacagacagacagaagtacatcaatcataaatactttcaggcatcaaaaaatgctaacagcaaagtgaaaaggtaacctacaagctgagagaaaatatttgcaaatcatatctctgatacagatttttatctagaataaataaaccctacaactcaacaagaaaacaattaaatactcccacttaaaaaaatgagtaaaaaaggtgctgaagaaaaaaaaaagaaaaaaatggtaaaggacttgagtagacatttttctaaaggtggttttcttttctttctttctttcttttcttttttttttttttttttgagatggagttttactcttgtcgttcagggtggaatgcaatggcgcgatctcggctcactgcaacccccgcctcccgggttcaagtgattctcctgcctcagccttccaagtagctgagattacaggggtctgccaccacacctggctaatttttgtatttttagtagagacagggtttcaccatgttggccaggctggtcttgaactcctgacctcaggcgatccgcctgccttggctccccaaagtgctgggattacaggcgtgagccaccacacccggccttaaagatggttttcaaatgaccaacaagcacacacaaacatgcttcacatcgctaattatcagagaatgcaaaccaagtccacaatgagataatatcctcacatccattaggacagcgactatcaataacaagtgttggcaaggatgtgaagttggaacacttgtgctccattggtgggaatgtaaatggtgcagcctatgtggaaaaaagtgtggaggttcctcacatcattaaaaatacgagtaccatatcatccagcaatcccactcctgcatgtattgccaaaacaattgaaaactgggtctggaaaagatacttccacatccatactcacagcagtactattcactgtagccaagaggtggaagcatcctaaatgtccatcaaaagatgaacagataagcaaatatggtatgtggtatgtatgtataagaaaatattggccaggcacagtggctcacgcctgtaatcccagcactttgggaggctgaggtgggtggatcatgaggtcagaagatcgagaccatcctggctaacatggtgaaaccccgtctctactaaaaatacaaaaaattagccaggcgtggtggcaggcacctgtagtcctagctactcgggaggctgaggccggagaatggcgtgaacctgggaggccgggcttgcagtgagccgagatggcgccactgcactccagcctgggcgacagagcaagactccatctcaaaaacaaaaacaaaacaaaaatacaaaaacaaaacttgtacaaaaacaaatgtgtgtagcagctccattcatcattgctagaaactggaaacaactcaaacaccttcaccatcaatagggcaaactgttgtacatccacgcaatgaaacttctcagcaattaaaaggagcaagctgttgatatgcttaacagcatggattaatatcaaaggcagtatgcggaatgagtgaagccagtctaaaaaggctgcatactatgcagttccatttatgtgatattctagagaagacacaactacagagatgcaagaaagattgaggtccccagaggtgaggggctgggggaggatttgactgtggagggtaagcagggggggttgctggggtggcagatctgctctgcctgttgacgacagtgatggttacacaaatctacacatgtggctgtgtgcggtggctcacgcctgtaatctgagcactttgggaggccgaggagggcaaatcacctgaggtcaggtgtttgagaccagcttggccaatatggtgaaaccctgtctctagtaaaaatacaaaaattagccaggcatggtggcaggcacctgcaatcccagctacttgggaggctgaggcaggagaatcgcttgaaccctcaaggcggaggttgcagtgaacagagatcgcgccactgcactccagcttgggcgacaggacgagactctgtttaaaaaaaaaaaaatctctgcacatgctaaaatccacagaactgtccatgaaaaaaaccactttttttctgtgtgaatttcaaaataaaataattaaaaaaatcagaaagagactcacgttaaaaaacaaagaatgaaaaggaaaatatattttccaaaagaagttgctgtgaaatatgaggagaaacatcaaatgtgaacacacaaagatgcttggtgctgataacaggaatgatcatccttagggaaaagaaaatcaccaccattgagctggccacaccaaaacaattgtaaattctaaatatatggagcaaaaactaattgaatttaaggagaacatgagaaatcaacaactgaagcgggattatttaacggagatattcagaaacaaatggatgaagtagagaaaaatatttgagagtgtaagatgtaagtaacatgatcagttaagttcatctaataggtgtttgtggaaatatgcaactaccaaaacccacaaattaagttcaagcacatgagaaatgtttgcaaaaacttttcagccatgtatcagaaaggaactatcaacagattcccatagacagtgtatactcttaggattacaaaggaacttatgaactactgagaaatgaataacagtgacagcaatctctatcaacatttgttggatgcagctaaaggtgtcctttgttgcactcagaaaattacagacataagcattagaaacataaaacatggaaatatggccgagcgcggtggctcacgcctgtaatctcagcactttgggaggtcgaggcaggtggatcacttcaggccaggagttcaagaccagcctggctaacatggtgaaatcctgcctctactaaaaaaaaaaaaatacaaaaattagccgggcatggtggtgggcacctgtaatcccagctactcaggaggctgacgcaggagaatctcttgaacccaggaagcagaggttgccgtgagccaagatcatgtcactgcactccagcctggggcgacagagcaagaccctgtctcaaaaaaaaaaaaaaaaaaaaaaaaaaaaaagaaacatataacatacaaataaatgaaccaagtgttcaaatcaatattaaaaataataacagagcagggcaggagcagtggctcatgcctgtaatcccagcactttgggaggctgaggcgggtggatcacttgaggtcaggagttcaagaccagcctggccaacatggtgaaactccgtctctactaaaaatacaaaaattaggcctggtgcagtggctcacgcctgtaatcccaagcactttgggaggccgaggcaggcggatcacaaggtcaggagttccagaccagcctggtcaacatggtgaaaccccatctctacttaaaatacaaaataaataaataaataaataaataaataagccgggcgtggtggtacttaaaatacaaaataaataaataaataaataagccgggcgtggtggcgggcacctgtaattccggttactcaggaggctgaggcaggagaatcgcttgaacctgggaggcggaggttgcagtgagcgagatggccccactgtattccagcccgggcgacagtgtgagactctgtctcaaaaaaaaaaacccacgaaaacaaaaattagccaagcgtggtggccctctcctgtagtcccagctacttgggaggctgagggaggagaatcacttgaacccgggaggcggaggttgcagtgagctgagatggcgcaccgcactccagcctgggggacagagtgagactccgtctcaataaacaaacgaacaaataacagagcaaaaccaaaatgccaagggaacgtgagacaggagtgcgagctgggagtcggcacacggagaggcagagacactcctcggaggcagaagctggttccttatagagatggaaagaaagaaatggactctggggagactggagaagaacagaaacacaggaggcagaaataaatactgcggatggaagcagagacaaaacaaaatgtaagctgctccaaatcggcggcggagcgagttctggaagagcggcggtgtgggaacctccggtgccttcctctcccagctgcagctgcgttcccaggcaggcctcccgggagccagggacggaggcccaggactccgccaggggtgggtccgttccccttcttggagggagtgtgacccacaggccccacggaaaggcagtgccactcccgtgacattccacaaggccccgctggccggcccctggcctgcccccagagaactgctcgcaggcaatgatgccctgcagcctgagacctgggcaccccggcctttgccccaaggaggctggggatagaagggcttcctccaggattctctgcaggagatgagcaaaacgtccgcagagccagtgactgcgggacccacgacaatctcaggtcacgcctgccgggagaagcagcacctggacctgagcccggggacgggcaaaggaacgcagctcgtgagtggcccagagagcgggaaccagagcgccccgacggcagcggaagccaccgcgggcgccaaaccagtaacgcgccccttgaggacaggaggccacggcgcaaaagcagactgggctcggaaacacgtgctttacaaatggggaaatgagtgagacgatgcaggagagaccgcaaccagacgtaaaaggtgaagaccaccgcgaagaggaagctctcagccagagctgagtgagagcccgcgggcgggagggggccgggcgcgcgggagccttccctgcaaaccccgggcgttccaggagcagggaggcacacggatggaggacaggagaccaagaatggcataaaatttctccgagcagaaggaacgccgcagagtgtgagcgtgagattgctagcgctcacaaattcaggcaaggcaggtgaggagagacacaggcctgcgcatcctggaaagctcttggacttaaaagatgaaaataaatgatcctggaaagatctcgaaagatcaagaatataaagcgcttttgtttgtttgtttttaataaaacgaacccctaaacgcacacagaaaggaagaacaagcatccatggattgttcggagaaaaaggttgatatccaagaatgcggtaccaggccaggaacggaagaaagtgaagtgacctggggggaggcgagcgctgatccgaggagaggagccaatgagaggcactcaccaggcaagcgggtgggcgggggcctggcgctgagcacagacaagtccaagggaagatgcataggagctgatcgtgcagagatggcagcaagtggcaacggaatccccctgcattgacaataaacctccaggaatccccctgcattgagagaataaacctcccggctctggttctgttccgtgtctgttagcggggtttaggggtgagttagggagagggcactgccaccagccctcggatatatttctcctgctgttcactatgtgtaatagacaaacaccaacaagaagagaagaggccaggcacagtcggtggctcatgactggaattcaggcactttgggaggccaaggtaggaggatcatctgagcctaggagtttgagaccagcctgagcaacgttgggagtttctgtctctaagaaaaaaaaaaattacctgggcatagtggtgcacacctgtagtggcagctactcaggaggctgagctactcaggattgcctgagcctgagatatcaaggctacagtgagctgtgattgtactactgcactccagcctaggcaacagagaaggacagtgtctcataaaagaaaaaaaaagaggagaaaagcttcccagacctgcccacaccatggtgtccaacaggtggctgggaccccatgtcctccggtcagctctcaccagggcctcatgggaccttcctgctgggggctgatctgaaatgccctgcttcttcagacggctgagggtttctgcccacccaacctttggcaatgccaggcgagacaggcacctgcagccccaccgtcactggcatcctctgggcaggtgctcagcgttccttagggcccaggagcaagccagacgccgcctttacttttgcaggcaaaatagaactttttaaacttctgcccatctctcttttgcacatacagtatgatagtcttgctaacctactgccagatgagtgaatctgcctatcaccaagcaacaggtgcactgtcccatgagagggatgggggtggacgtacagaactccagggttctctgggcaccctctggtgcttccaggcctgtgaattggcacagcaggaccacagacctccaaggtgcccacctgggggctcagaaccctggcggggaaggtcagtgctatcccaccggagaagagacctagtctagctgagcccctggccagcggcaaggaggaaaggatgaacatcagccacgcctggcactgactgccacagccagagcctcgcccagcccaagaatgtttctgttctaagacttttttcttttttgtattttagaaattatcacaggcaaatgtcaccttgaagacccggtggcagcaaagtgtgagctcagtgtggggcatgagtgttctgaagctgccaggggtggactgcagtgggtgccatgggggctgtcatagcccttggttcttgctattgcaggccacgctggccacgtttccaccgcagtgtcctcagctcctctctggaggggtcgtctttccacctaagccgccctgccctgcagcagcgggaagtgccaggaataagtgccccatggaagcatccccatcccgtgaccggctggagctggtctaaaacatggcagcgccagggactgagccccagttggtcgcaagtggtcaccttgatgctggacccttcaccagtggccttccctgctaacgtcacctccccaaccctacttaggagggtctcctgggaccacctcctaagtaaaccacttgagcttgcatctgcctcatctgcttctgggggactcacactagaaaaacaaaattaatatttttttgttatatggagtggtgtgatttgaaatccttctatggataatgaatgcttgcttatgtctttaaaaaaaatttttttttttgagacagagttttgctatgttgcccaggctggtctcaaactcctaggctcaagtgatcctcccatgtcagcatcctgaggagctgggactacaggtgcgcgccaccacgcccgactccagcatctttgttctcttaatattgagtccagacatggagttaggcaaccgcaggcatgcagattacactccccagcaagaaggctcatcattgacacacatgcagacttaggctgtaccaggcatgtataccaggggggtgcattgtgagtaggtaggtgtgtgtgcgggtgggagactgtgtgtatgtgtgagagagagcatgtggcagtgtgtgtgtaggtgtgtgtgcatgtgtgagagcatgtataggtgtgtgtaggggtgtgtgtgtgcgcacatatgtgtgttcatgtgtgagattgtgtgtagatgtgtgcccgttcctcacagcaaccctgctggtgagtgctcctgtggtcctctctttacgaacaaagaaacaggttaagcactttccggaaggctggtgacccacgagccctgtgtcacacttctcagtctgcctggggccctagctctcagcctggacacttggcccctggtgaacaagtcatgtcggagagaacccgtctggtgcgccatctccaggatacttgtgtccctttgtacatatatttaaaaattcattttgaaagaacaaaaaaatctccactgccctccttcacatctgcgatttcttgattttcaaacactgaaaggctcgttttgctcctggagagattctgctcggtgcctctgccatgcttgggttgggagtgaaagttttcctgacttatttgggatactgtcctcaaatatttcagatgttgggtgtctgcgagggtcccatggttatgagccatgggaagaggcttcgtgtgactcagtgattggagagtttgtgggtggaattggggggtgctgagcttggaaggggaagctgcatggggccagggctctcgggagcagaaatggatgatggttggggcccacgtccgccaggacagagcctcccacctcgagggctgcattcccagggctacaggtccctggtccacccatcatgaggtggccaggacattggatggatagggcagatgaatggacaaacagcccaggcaaggatgcagggagacccacagccgcccatgccaggccctccaagtgggcaggaacaggtttcccagcttcttatgtgcccacctcctgttcctgccagcatctccctgcacccacgctcagcgctctgcagtccaatctctgtctttcccaaggagaccctccccactgcttagatgtgtcaaaaatccttttccaccaggttaatatttttactatttacttattttttcttctttttacaaacagagatgaggtatcactgtgtttcccaggctgttctcgaacacctggcctcaagtgtcctttctcctcggcctcccaaaatgcttacagatgtgagccactgcacctggccaatttcatatatatgtattttttttaactttttaggttttctatccaatagcaaataaccaaccaatcttgaatttttacacatatcctaacctttctggaatctgcatggtagcacagggtgagggagatggcttactgctcacccatctttgtagggtgaggtctgccctgccctccacatgtggcccgtggacacccaggttggttccgcctcggctcgcctgggccctgctggcctggctcacttcaggaccaccctgtagcctcacccaagaatcatgtccaggtgggagaggaggagatgaggatgctggtctggcgggaggtgggcagtggttacttggtgtggccggggggagaggcggtcgctttgaaggctcagcccccaggaggcctgtccagcttgggtttgtggttcctggggcatgtttatcactgcggtgcagtggcctctcgtccctcactgtggtcggcctcctcatgtcccagcagccccagtgtctgcacagaccatggcccctggacaagccatgggaaggccagggtggggccaaggatctcggagaccagggtcggctctgccttgctctgggggtgatgatggaggcgccagtgtccctctctccagcgctcctctctccagtgctgccactgagcccaggctgctaaaatgggggagcttggaggatccctctgagacccctgaggcgggagccctgcggtggccccactgctgcagccctgacgccgtgtccccgctcctgtcctccccagtagctttccaaacgctcctgcccagggccctgcctgtcctaagctgaacctgagacctgagggcggctctgcaggaggcccctccaggacatcacgcagcccctcaggcctgttggacatcgtgcctcttgtggtttggcccttgctaggtccaacatctccccagcttcccttgtggctccccctcccagcagacctcccagggagcgggtgcaagcccctctgtccccacagataggcctgcccagagctgggggagaaggactttatttggagtcaggtgggtgggagcagggaagggtcatggctggagggtaggtccaggtggtccaggctctgtgtctggtggtagggtgggctctggaggtgcagacccgggggctgctgtgctgggaagaggagcagaggtcagggaggctgcagggtagggcagaggccagggccagagctccctccccaggctctgcagcccccacatcggccactgctgggcaacctcggggctccagagcgacctcagctcctccaatgactgggcaggcctctgagcatccttggtgggtggatggtggggagtggaccgcgtggggacaggtgcagggggcgatgggctgagctgacacctgagggagccggagggaggcctcgctgtggaaaggccgaggaggaccctcactcgggctggcaggtgcaggaatgataaaacaaaggacttcccgaatgtcccaggaactgtgggtgggcagactctgaggtgccaacctcgtgcctgaccctgggggggtctccctggctgtgtgggatgggaggggccagagcagatgtaccctcgaaccccgggaacccaggactctgggcttgtccagtgccctcctaaaggctcactcaccctagtgttcgggaacgcagcttcctgcagagaccaagaaaaacccagggattagaaggcgccctagaccagggcccagaccccatcgcagcccagagctcagagccccagagcccatcgcagcccagagcgcggagccccagaccccatcgcagcccagagcgcggagccccagaccccatcgcagcccagagcgcggagccccagaccccatcgcagcccagagcacagagcctccaatgaggaggacgctaaacagggcccgggagcccctgcgaggagactcggggcacacggggaatgcgggggacatgggaggacatgggggtcatgggacactggagatagcagacagacacagcagagggacacaggggactgggcacagccatcctcacccgtctgcaggggcgtgaaaatgtcctcctccgagagtcccttgcgctgcaccaatttcttaaattcttccagggcctcccggttggtatcagaattcctacctgcaggtgaggtggccaggtgagccgacgtggggacagcggcacggccctgcagggagcagatgccgaaaggagacgaccacggcccagcaccaggacagggggagaggcctgagagtggatcagagctcgggggtggggctggggacagaggagatggccactgcccagcaccaggacaaggggagagacccaagagtggaccagagctctggggtggggccggggacagaagagatggccatagcccagcaccggacaagcaggagaggagacttgagaatggatgagagctcaggggtgggactggggacagaggagacagtcactgcccagatgagaggtccccaggaagggggacagtggcggggactctccaagccactcggcaaccccaggggacctgggcagctcccaatgccaccctgcagggtcacagccctcacctggagggaccttgtctcccagaggcaccggccaccctcctgccctggagggtccctgccccatgaagagctctcttaggacgcttaaggtgaccctcccccttaaggtgaccctcctacacccgagaccccagaagtggcccttggcaggttcatgtcaccgagggccatgtctgtccctgcctggcccatcccattcccacttcaggtacttggaccggctgcccagcggtgcccggcacatgaaagccggcacagggggcttccttttcccccatgccagggcatggtggtgctggttccaccggcttccagaggcagagaccgtggggcaggacacgcagaccccagcaagcccctcacccacaagctttcccatgtggagcaggcccccatggtgctggtctttgcagtaaaagatgtagtggtccctcctgggcagctcctgcaggtacatgagcttcctgcccccatctgtagatgacagagaaaatgggtcattcccagagagaacactcggggccacatgaagaaacactcgggaatgtttcagcggtcacccaggtgccctggacagcctgagccaggcctggctgctccgcacagtgtggacccggacacggaggcaggagcctcctctcaggaaggtcccaatgcaagtaatggagccacaaggccagagcacgtccaggactagagtccggccttcccagctccagcagctgctcctgccccacttccctgtccctaaccctcatcttccccctcagcctccccatctctaatcctcagcttccgcagcactaaccctcggcctccccatccctaaccctcggcctcctcatccctaaccctcagcttcccgatccctaacccttggcccccgtccctaaccctcagcctccccatccttaaccctcagcttccccatccttaaccctcagcttccccatccctaaccctcagcctccccgtacctaatccttggcctccttgtcccaatcctcagcttcctcaatgtgtcaatggctagggcctcccagagggcaggcgtgatctggtccatctcgactgcggacaagcctgtcacacccggtgtctgatgtcagggccaccagccccccaggaaggagaggccagcccctccttggaggtgggcagagctggggccctggcaaaagggcagcctgggcactctctacctgtggaggctggtgcactggggttggcggtgggggagggtgggggtgggagtgggggaggggctcacaggcgctgtatttgccaggctcctccgtcttccgcatcaggattttcttctggatgcacctatcctccctcctggaaaacaggagacacgcgggcagcggctcccaggacacccatggcccatcctcagctcacctggtgcatggccctgacccggcaacctgaaaattccactgccccccaccccaccgagcttcaggatgcccaggctgtttccctccaaggcagggggtgactcttcccaacacccgaaacgtggatggggcaatgggcaccaggtggatctggggaggggagcgaaagtggcctgaggggccctgcagtgggcaacactcacatgaaggtgaacgtggcttccaacttcccaccgcccagggctgtcaccttcactggggacaccttcctgggcctcctgtcctccggaaagtccttatcgaccaccatggccttcacgtaccaggtccctgtgatctggagcaggccaaggccgtgagcccaccatgggtggcccagattctactctgaccctggcactcaggcctgcagctataaccagacacccatggtgcccggctgctgcccttaaaggcaggctgtgttcctgcaccttagttagagctcagctggagtgagttagagccagccccctgctcagggctcccagcccccagtggaaggagggcatgtctgcaccccatggacccccgggccccagcaccaggtgagccctccctccacagggcccaaccctgcgagaccttcgggcttcaggcgtcagtgcagcaggaacccctgagacgagcctgctccggccctgggcctcggggggccgtgtctgctggaggaacaataggacccctccaccaccaccccaggctgggagcacggggtcagaagccagccttcagtgacacctcctaaagcagggcccctggcactgccccctgcccaggagtccgcctggctcctccatccgcccacgccaacccagctcacatcctcctcctccagggtgaaggacagggcagcggccaggccgagcgtgacacccaggaacagggtcttcatctccagagctctgtgctgccgacctcggcaggtcactgggcgtctgaacaaggctgtgctggctcctctcgagatgttctttatagccccctggccagtgtcctgggagcacgtggcacggtgcacccctccccatggtggcaaccagtcctgcatccgggagggggagtgtcctcattgctggcatctggtgaacagcaagtcagtgccagccagagaagaaaagacacacgatgccatccagagtttgcaccacccgaacgcgcccactcagatgagcccagaggactcgagaggacagggcagggtggtgtccatctgcaccccaagccacagaggcagggcccacagcctcgggatactccctcaccaacccctgcaccctcccagggccacggctgggaccctgggcaagtcctctggggaactggccatctccctgctgagcagaaatggactgggctttagaaccagagagacgtggggctgctgccagctgagtcccgcacgccctagagcccaagcttccgcccactctgggacccactctgcattgattttccccacctggaccctgcactcgagcttcctaggggcagaggagggcactattgtgtggctcagggtcagtttatatacggcctcctcgggccatatgagggaccccgccgcctccccgaccccgcttcactccgtaccggagcctggctgtgctgtcctcagaacacgcgatctctctggattgtcctgtccatttcttcctgcacgtattcatcgaccatctccctgttagaatatacattcccctctctcgtcagctttgacggcccccagcccccaggacaggccttgaatctcatccctttagataaacaagtcgcatgaggcaccaagagtcacctgccagcctgtgctcagagttcgtggctgaggtcccttgggcacctggctctgctggcctcatccccagccaacctgagccagaactttgccttctccctcccggaccctgcatttcccaggtgtgtgtcatcttccctgggacccaaggctgacccacgctctgcaggcaggtgctggacccacacaatggcatctttgtgcctctctggcccaagatcagacactctcaagtacttactcaataatactaatgcacactctaataaaccctggggctgtaacgaacgggctggtgtgacccagtccctcacccctcccacggcaagtgctgccgagcagaaaccccccaccctcatccccccgggcaggaaagaatggggcctgggctcttcaggaccagagatgagcaaacaggctggagtctctacatcaacgggaaggtttctctgttctctgtgtttgttgactgtaccccaggcacctcgtatttcattggttgtttgtgaatcattgatctaagcaccttacaacactggtgctgctggctcaatccttgaagaaaatgctggaacgacatgcacagatgcttcagagaacagggctctcccatgaggtccacgctcagtgcgacgggtgctctccaggagtctcccatcatccacccatcttgccctgtgtcccagtctcattcgccaactgtgtccttttagatactggttgggttcaactggtgcagacaccgtcaggagatggtagggctggaggttgggggtcaacccatggcagacatgaggggtgagatctctggcccccagtgctttgtggcctggggcacttctctggatggctgtgttccttctgatggtggctcctgttgggctgccgctaccacacaactttctctctcaccacttccctcacgacccttttctttgaatctcacagtgatcacagcttttcagggctgctaattcctaggtgcttcactgaagtggacagtgtctgggctttactcgacacctgggcataagaaggtttagatggcaccaccaaacaagcacctagaccagagcatgtgctggctgggactgaggcacgccaagaaggagcagagtgggagcttacgatgaatctcagttaaggctgcaagaccaactgcacagtagggaccatcgcctgtgccaccaaccacctattttaattatttcagagacggtggctggccaccatgctgaagcatcagttacaaaatggacttgatttgctgtgtgagtgggtcagtgcagtgcaaggggtggctgaaggcactggtgacccacgctctcggcccacctgccacagttgtagatcgttcctggtgcacggacgtattcacagcttcccaccttaagtgcctgcaccttttcttctgtgcttcccctgacaccgatgaaacccagatgtgcaagtgaatcagcatcctcagtctgtagggatagtaactgatgggataaatggtctggactcttccttctaagtggaacaatcaaatatggttccaccctatttctcagatggtcctcagaaggactgagtcccagttgcccacaatggtaacatcattaacatattttgttggtttttctaccttccaaatctcacttgatctcagacttctggccaccagaatgtgagaaaataaatttttgttctaagccacccagttggtagtattttgttatagcaaccctataaaaataatacaaactctagcatgttaataattatattaaatgtaaatggtttaaatattaaatgacagtgattggcaaagtgaattaaaagccattatacaactatatgccgtctacaagaaacttacttcaaatgtaacaatagagacaggttgaaagtaaaaacatgaaaaaagatatataaacattaatcaaaagaaagcagaagcattatttcaataacaggtaaaatagactttagaacaaagactaattaacagagagggaaattatacaataataagtgggccattctgcaaagaagacatagtaatcctaaacgtgtgtgcaccaaacattagctgcacaatatgtgaagcaaaacagaactgaaaggagaaatttaaaaagccacaattatagttggagacttcaatacccttctctcagagcaactagacagaaaaccagcagggacatcaaagaactcggccacccatcaattaacataatcgaattgacatttgtagaacacaccacctggcaacagcactacacacattcttttcaagtgcaccagaatatataccaagatagaccatatcctggatgagaaaatgagcctcaagaaatttttaaaaatttaaatgatatagagggtagtctctgaccacatggaatctaactataaatcaatgccagaaagataatggaaaatctttcttcagaggcttggaaacaacacacctgtgaataatccacaggtcaaagaggaagcctgaaggtaaatttaaaaatatactaggctggatgaaaatgaaaatacaacatatcagctgggcgtggtggcttgtgcctataattccagcactttgggaggcccaggcgggtggatcacttgcgatcaggaattcgagaccagcctggccaacatggcgaaaacccatctctaccaaaaatgcaaaaactagctgagtgtggtggtgcacgcctgtaatcccagctaatcgggaggctgaggcaggagaatcacttgaacccgggaggcggaggttgcagtgggctatcatgccactgcactccagcctgggtgacagagcaagactccatctcaaaaaaaacaaaaacaggctgggcacagtggcttatgcctataatctcagtgctttggagccccacgtgggcagatcacttgaggtcaggagttcgagaccagcctggacagcatgacaaaacctcatctctactaaaaatacaaaaataaataaataaataaattgctgggcatggtggcgtatacctgtaatcccagctacttagggggctgaagcaggagaattacttcaacccaggaggtggaggttgcagtgagccaagatagtgccactgcactccagcctgggatacagagcgagactctacctcaaaaacaaacaaacaaaaacatatcaaaatttgtgagacacagctaaatcagtgctgagaggcattaaatgcatatattagaaaagagaagtccaaaatcaactatctaagctcccacttcaagaacctagaaaaagaagagcaaaataaacccaaagcaagaagaaaagaaataacaaagataagagcagcaattaataaatcaaaagcagaaagcagaaaaaatcgaaagcagaaaaacaacagagaaaaacaatgaaacaagggctagttctctggaaaaattaataaaattgaggcagttctagaaagactgacaaacaaaaaaagaaagaaagacacaaataaccaacatctggaacaaaacagagactatcactacagaccctgcagacatcaaaggataataagggaatactacgaagagaccttcccacatatatttgacaacataggtgaaatgaaccaatttctcaaaaaacacaatgccaatataagatagataactttaatagctctatgacaattaaagttaacattttaattttaaaagcttccaaaaataattcttcatgtccatatggtttcattagaaaattctaccaaccatttaaaaaataaataacaccaactctgcataatctcagaagatgagagaatatctcccaaccaaaacctgacaacacaaaaaggaaagctgcagaacaatatacctcatgaatatagatacagaaatcctttacaaaatattagcaaataataatatataaaattaattctacaccatgaccaaaagcagtttattccagggatggaaacctggtacaatactcaaaaatcaaccatattaatatgttaagaagaaaaattacatgatcatatcgatcaatgcagaaaaagtatttgactaaattcatcacgcattcaggaaaacaactctcagaaaagtaggaatagaagagaacctccttaacttgacaaagagcatctacaaaaaacctatggctaacatcatttctcatggtgaaagactgatgtgtaactggctcaagtccagctgctcgctgctcagaagtcaaggcatgagaagtgaagtgtggtgaaaggaaagcagcattattcaaatgctagcagtagaggaatggccaggcccatgcctttaaaagaccattcaaactttctggactgagcgaaggggtttaaggaggaaaaggtgtgggaaatatgtgggaatggtgcaggaggatgttggtctgcatcttgttccaatggttatcatgagtcattaatcgtctgtccagaggtctggtttgagtcatcctgatttcagccgggaagtggtaggctacctgtaactccccctaagagggaggattctgcagctgggtctctctgcctggtttgtttcaaaattggcccctggaatttctaagtaagcacataattagataagcgagcactgctcacagaagtgcctggtgggaaagggagaaataaagagtttcgaagtatgtttcaaggctgaaagcaagaaaggaaaaaagtttttaagcacattttgaggctgggatactcagttacaaacgctttctccttaacatcagggacaaggcaaggatgtccactttcaccacttgtatttaacatagtacagaaagttctagtcagagcaataaaggttttttaaaaaggaaattaaagacatacaaattggaaaggaaggaagaaaactgtctgcatctgcagatgacatgattgtctctgtagaaaatcccaagaaactgaaaaacaaaacaaaagaaaacaatacacctcctagaactattaagcgagttcagcaaggttgcaggatacaagataaatatacaaagatcaattgtgtgtctacatactagtaacggaccctaaacttaaaaacacaatactacttatagtggctaaaaaaaagagatacctaggcataagtttaacaacccatatgctggatttgtatgctgaaaataatgcaatgattataaaataaatcaaagaagatctaaacaaatggagagatgtgctatatccatggattaggagactcaacataataaaagcgtcatttctctcaaataatataaagatttaacacaatttctatcaaaattccagaaggaatttttgtagacatagacaagattattctaacatttatatggaaaggcagaggaactagaataactaaaacttttttttttaagaataaagtgggaggaatcaggctaccctttctttccttttcttcttctttcttttttttagagacagagtcttgctctgtcacccaggctggagtgcagtagcacaatctcgactcattgcaacctccacctcccagattcaagtgattctcctgcctccgcctcccaagtagctgggattacagatgcacaccaccatacccagctacaggctaccctttcaagactcattgtatagctagcagatggacagatgcatagatcaatgggacagacaataaagaatcctcaaacagacctgcacgcatatacccagttaagtttttacaaagatgcaaaagcaattcaatggaagatagcttttgtagcaaatgggctggattaactggacatccacagacaaaaccaccaaacaaaaagaagaaccacaaccttggtctcacaccctgcaagaaaattaactcaaaatggatcatagacttaaacataaaacttaaaactataaaagctttagaaaacagaaagaaaatctttgggatatggagctgggtcaggagattttagatgtgtcaccaaaaatatgatccataaaaggaaaaattgttaaaatagacttcatcaaaataaaaaccttttgctctgtaagagaccctgttaacagaataaaaagacaagccaaagactgaaagaaaatattgacaaactacatattcaacaaagaattagtttctatactttataaagaatttttcaaaactcaacagtttcaaaaatagaacgtaaacaaaagacatgaagggacacttgactagagaggatatacagatggcaaataaacacatgaaaagatgctcaacaccattagtcatcagtgaaatgcaaataaaagccatgatatatcagtacatacctattaaggtggctgagataagatcatagtgatcacactgaagcctggtgaggatgcatggaaactggacagtttctggaaaatggcttgacaggtttaaaaaaaaaaaaccctgcaacaagcatagaaccccgcaatagaacccctgggcctttgtcccagaaaaatgaaaactgatgtccatgcaaaaacctgtacatgtgtcatagcccaaatctataaacacagacatcctccaacaggtgaatagttaaacagactgtggtacatccataccatagagcactactcagaagtaaaatggaataaactattgataaatgcaacaatgggatgaatctccagagaatgatgctgcacaggaaaaaaaaaagccaatcccacaattttatgattgcaatagacgacattcttgcaatgagcagatttcaggagtggagaacaggtctgtcattgctggggttggggctggagcaagccaggtgaagatacacatgatagctctgtgtggctttttacaactgcatgggaatctacaatgtctcagggttaaatgtttaatttaaaaaccacaataagcataaatgcttaaaaaaaaaaaacctagagccaaagactcagcaactccactcagaagcatcatttcaacagatacactcccacacatgaaccagcagaagggttcaattgttacttacaaatcttggaaatgcctcaaatttccatcaaaataacaatgactgaataaaggttcatttttatgtttgatttttgcagactttctagatgcctctcattctttggggcacaaggaatacatcgatcaatgaaacaaatgtcctgtgctcggggggcttatattctaggtgcaggggacttaaaatgaacacaataaataagtgaattgcagtgccagctatcaatgtcttgcctccagctccacacgtacccttcatggccggttccgaggcaatggagctggagccagcaggcgcttctcttgtgcacctggtgcaatgctaagctttgttggttgaggcgtagggagaagcgcctcctagcatgggtccaggatgactggttccagatgcttccatttcttcctttttctttctcttcctatgcaaatggcagtggcacaagtcggggacgtctggcggcacacaccacattgaattcaggggaccgcccccagatggcttcctattgagattcagtggcatctgcacctgtgggttcccagtgactcttgcaggcttcccagccccagcccacctgccttgggtggggagagaggcttcctgcttgccagacccagcctacatttccctgcctgctggcctctgccctgaccgtgggccagctgtggctgggacaacccagcaaacttctccagcttcccttgggagaaccacaccttctcccgtgaggtctgaacccagacttgtggaaaggatccccacccctgtttatttcttccttaactgccctcgtgcaatcctgagccattctttgtggttctctttaaacctctagagctgattgttcattgtgcaagcaatccctgttcaatctattgtctctggatcctgatgggtcactggttcatacgttattttaaatggtgatcagtgctatggaaaaagcaaagtggacaagttggacaggagtgtcaggacaaggggttatttgtcctttaaatgaattgatgaggaacagccccgccaaggtggcattcaaacaccgaatttaagacatgaaggaagcaagccatgagctcgtcagctggaagaggagtccaggtggcaggagcatccagtgccagcctggaggtgggagaacgctggcagtttccgggaacacacagcagagcagccacagcaaatgatccagggagaccggccacacatgaggctggggagtgggtggaactgccatgtagggattaaggaccaccacgaggacttcagcttctgctctgagtgaaagaccctggagagctctgacaaaggcaagctgtgacttacgtatttaaggggtcactccagttgctgcattgagcacagatttggaggccgaatatagaagcagagaaagcagttagaaaagacgcggcaataacccaggatggtgcactgatttctacctgggcatccaggagaacaggggatggacctaactgtcccaccacaaacagagggaaactggcccccaggtgcaaaacgcttgtgtttagaaactggacacagacagcgcaggctgtgatccctgagaatgggagctaacgagctcagctggatcatggcagctttatgcctggagggaatttcaatccaccacagagagaggaacccaacagagcaaggagtcagacggcgtggacgggacacagattggactctaggcatcgcagacgactagaatgtgggagacaaggaaagagataggagagccctctgcagaggaagagctccagaaacatgcagagtggtcctcaagaccatagctaaataccagtccatgcagacagagggtggaactccacagggccagagaaaatgatgtttgggtaaagaaggattccaaggaactgaagaaaatcaacaccccacaaacacaggtgcaagaattagttgagatgccaagataagaactgtcttcaacaaatggctctgggacaactggatgtccacatgcaaaagactgaggtgggacctcacgccacacacaagctttcaaccagaatggatcaaagacctcaacgtaagagctaaaactgtacaactctaagaagatgtgtaaatctctgtgactttggctttgacaatgaattcttctctatacacccaaatagcatgcaaccaaaggaacagacaaattggacttcatcaaaattaaaaacttttgtacgtcagtggacactgtcaaggaaatgaaaagacaagatacagaacgtgagaaaatacttgcaaatcacatatctgacaagagtcgagtctagtatcaacaatatataaaatacacttataactcaacataaaaacacaactagcccaattttaaaaagggaaatgaatagactttcttcagagaagatataaaaatgaccaataaacacctgaaaatatgctcaatgtcattagtcattagggaaatgcaaatcaaaactacagcgaaataccacttcacactcattaggatggctagaatcacaaagccagataataacaagggttggcaaggatgtggagcaattagaaccctcatgcaccactggtgggaatgtaaaatggcacagctgctcagaaaaacatagtttggcagtttatccaacagttacacatagaattatttaataccatatgacccagcagttccactcccaggtatacacccaggagaaatgaaaacatatgttcccatgaaaacatttatgcacaaatgtccctagcaacattacaaaacccaagaagtagaaacaactcaaatgtctaccaatggatgaatggataaaaaaggtggtattatccacacaatgaaatattattctgtcataaaaagaaaataccgacccatgctaccacatgagcaaacgttgaaacattatgctaagggaaagaaaccaggcataagaaacacatatatatgattccatttctatgaagtgtccagaacaggcaagttcatgcagacgggaagtcgatgagaggttctggggcgtggagggaagaatgggggtgagagcagacgggcatagggacctttgtaagatgatgaagatctcctggaattagatagtggtgatggtttcacagccttgtgaatttactgaaacccactgaattgggcacttttaaagagtgagtatgatggcatgtggaatatatatcaaataaaaattttaaaaaccacctccccagagaagcctctccaggctacacaatggaagatgcagcccctcctctctctgtcacttccctgagctgcgctccattaggacacatcactccccggagacaccctgttcatttacttgcagtcctattgattgccagttccccccatgggcagactgaataatggtcccctgaagatgtccgcatcctcatccctggccctgtggatgtgtgtatgtggtagactgaataatggtcccctgaagatgtccacatcctcatccctggccctgtggatgtgtgtatgtggtagactgaataatggtcccctaaagatgtccacatcctcatccctggccctgtgtcccccatgtgtagacggaataatggtcccctaaagatgtccacatcctcatccctggccctgtggatgtgtgcatggtaaaacggacttcacagatataattcagtgaaggatctgagatgaacaattaccccagattatctgggtgggcccactgttatcacaggggcccttataggagagaggctggggagcgagggagggagagagaggagggtgaggagagagaatatttatgaacagaagtagaagaggctgtgctgctggctttgaaggtggaggaggggccacaagccaaggcatgtggaggcctctggaagctggaaatggcagggacagactcctgcccaagagcctccagaaggaaccagccctgccaaccttcgttttagccccgtgaaacatactgaaaagaagagctggaatgaagcatctgaagttgtctcagcaaaacctgcatgctcggttgtggttgtgggttttttgaccaacaaatgaaagcgttctaagaccccatgcaccatcggctgaaggggagcatgaatatctattcccagtcccagcctcacaaccagaggatgcgtttcctcacggttttctcctgcagctcaaggagggaaagcatttggaattatttgacttctccccctcactcagtggaactttggagtcgttcttcccacccttgtcaaccacagggctttctcaggtctacaggcgcgtgtgcagattgcttgggtgtgcacagatgcagggagggcatctcgtcgatagaaaatgggatactcttgggcacggcatgaagtgacaccacaattccctaaattgtttgctgtggttgctcattgggacgtggcacccactggaaccaagactttgggaagccaactggctgctgtgcttggccacagacgtggtaatgacttcagggagaatggggcggggactgcctgactgatctagggctttcagaaaggaaatgccaaggtctgagcttcagtaacaggcaagacaatggagatgttccatcctggccttagaataatatttcattcttgcagccacagagcagaaatggctgaaaatcagactccatatttaatagtgtggattgcatggtgagttggattcaaaagtcgccaagtgttttatgtgaaagttgggtcactgcttaaggagtgggaccatgacacacagaactgggacatttatgtgatctcagatggaagtgagaatcttgatcccctccccaatctccctgaacctgccggggcagaatcaccccctcctcccctacccaatccccctgaacctgcctgggcagaatcatcccctcctcctttgcgtgaggagatgagacttccctttctcagacatcttaccccgaggcagttgtgtaggggtggattctaggggctttacaccaggagaaccgcgctccaatgtggacccaagctgagtgtgtcagtgcgtatgtgctgagtgtgtcagtgcgtatgtactgagcacggcagagctctcagcatggatcggctccgcccaagcccctgcaccaggagacaggagatcgccaagctctcatggcatccaacagcaggaggcgcatccctggggtggccccagcgccctaaatgcttgcctgagagctcggcactgcaggtgaatttgctgtgtgtcctggccagcacccagctgccccttcttagagcttttgctaaaaagggcttacacctgtgactccttcctctgccactttgagaagtctgtgtttctcctacaatgcagaagtgtatttctcaggctggctgcagtggctcacatccgtaatcccagcactttgggaggcataggtgggtggatcaattgaggtcaggagttcaagatcagcctggccaacatggtgaaaccctgtctttactaaaagtacaaaaattagccgggcgtggaggcacgtgcctgtaatcccagctactcgggaggctgaggcaggagaattgcttgaacccgggaagcagaagaggttgcagtaagccgagatcgtgccactgcgctccagcctgtgtgacagagcaagactccaaaacaaaaaaaaagtgtcattctcagggacctgagagccattccttagaaatgtgaccttcaggaagaatgggcctccttcttccagactctgttgggggacagagtcctccttccataactgccacacagctggtcccactgcactgaccctgaccagcactctgtaactcttcaccggagcccccactccctcccgcacccccaaccactctcccttcagaacaccccttctcccctgcacaaagtggcatggaaccagtctgttcctggctctgagaagttgctgaataaaacctgtcctcaccgctttaactagcattcagcttggctcactggtgacgacgtatccaaaatgccgtatttaacacattggcttgagcggtagagcagctctcagatggcttccaggactggctgagctggtgttgaggcctcattcacaggggctgggacgccaggatggccccacataacatggagaaaggactctgtgctgcaggtgattgaagggttcccagggtttgctttaggctggtgggggaagacacagccataggaatgactgtgggacggaggcttattacacttaggcccctagaaacaggaggggcggggcctcacggaagcaccagggcctgtctggaggcaccgggcggagcctgcactgcggttcccacgtttcccacgggaaggaacggaggaagcagggtaaacaggctcagggcgggctggtttcaataatgtcccgggccctggggtgtgggggctggctgtccctagctgtctggtccctgccctggggagggtgtgggctctggactggttggtttgcatatggaaggcacacttacagatggtccctgccctggggagggtgtaggctctggactggttaccggtttgcatatggaaggcacacttacagacaagtcatctgctatttctagaaattagccaactcctggagaagcactttctccagggttagcaaggccccagatgtcaaagtgtccaaattcagaaagtaaaggccatggttcacacagagagggtgtcggagacaggtcgcgcagtcatttgaagagcaaattactgtaaagaatccccagctggtaacaggagaggggctaccaacgggtaaagaggactctcaaaccacagaaataacagaaatgggagccagctctaccccagggctgaggctgcacaccggggtaggaacaacctggaaggtgctcaggcctctgtggagagggtcttgctctgtcccccaggctggagtgcagtgacatgatcatagctcattgcagcctcgacctcctgggctcaagcaatcctcccacttcagcctcccaagtatctgggattacaggtgtgcaccagcaagcctggctaatttttgggttttttttggtagagctggggtctcgctatgttgcccaggctggtctccaactcatagcttcaagtgattctctcacctcagcctcccaaagtgctgggaacacaggcataagccaccatgcctggccagaattgagttttttttaatatatatatacacatatatatacacacacacacacatacacacatatatacacacatatatgtatatatatacacatacacatatatatatacatatatacacatatatatatttttattatactttaagttctagggtacatgtgcacaacatgcaggtttgttacatatgtatacatgtgcaatgttggtgtgctgtacccattagctcgtcatttacatgaggtatttatcctaatgctatccctccccctaccccccactccacgacaggccccggtgtgtgatgttccccttcctgtgtccaagtgttctcattgttcaattcccacctatgagtgagaacatgcggtgtttggttttttgtccttgtgatagtttgctgagaatgatggtttccagcttcatccatgtccctacaaaggacatgaactcatcattttttatggctgcagagtattccatggtgtatctgtgccacattttcttaatccagtctatcattgttggacatttgggttggttccaagtctttgctattgtgagtagtgccgcaataaacataccccagggcttcttgaagcgccactgagccccagggctggattttctcaaatgtcctctaaagttgttcgctcaccctaatcgctccctggagagcaggtttctgcagcaaaaggaagcacaggcgagtcaggagaccccaggaatgcagtcaggaccggggcccctcatcagccaccaactccaccaccccaggaaggacaaagccagaattagacacagtacagttacgcgcccgtgcaatgcagctctgctgacgtccccatgcggggacatggggggctctgcagggccatgcctcctaccgctctgcctggggatgaggatgctctccgtgctgagtccacgggctcctgcagctttctcaaagtcctccaaggcttccaggttgttctcggggtctctgcctgtgggtgccaggacgagatgcgggtgctcaaggcagcactgggcagacggcaccccgtcccagcctggaggcctgagctagcctggggagagggaccttgcccacggtggggggacttgaacccagaggtcctcaggctggcaaagtgggaccagggtgccgtgcacggctgagaaggctcccgcagcagcagaaccgggagaacgggaagggctctccgtccatccccaagcatctcccggagtgagaatggactgcgggacaggcccgccctggaggaagcgcctctcccctcgggggcaccagggcaccgcctgtcccattcctctgtcattcacacacccctggctccagggagaactcaggagccttcacgggcctcgtcctccgacagggacggcactgatgcgccaccgtctgtgggagccaccgcgtctggaattcaaccccgggagctggaacgttctttccacgcagactcctgctcacatccccattcctctcccctgctggacaccccacaggaacgcgctcaaggatgacactgcagggagctgccccgggggaaggcctgggccactctgggacacgtgtgacctttgagcccctgtgccgacagctgtggctccttcctgcctctgttgcagagaccgaggccggggcatcccaaatcctgaactccagggtgggaattggggcctttatcaggaaaactcatcctaaggaaactgcagtgtgttcctgggtcccagtggcttctcccatggggaagagggtgcaggaagccgagggaggagggagggtgggtggaggcatgggttgcagggtgggggtacgggacccacccacgagcttcgcccctcggatcggcttcccgtgcagctcaccctcacagtaaaagatgtagtggtccttcatgtgcgacctgatgatgtatgccacgtgcttgcccctgtctgcagaaggacagcagcatagtcctgaattagccaccggggccttcagagaggatcccgggacagtgtgcgttgccaggccctgcaagccccgcagctcctgcacccttccagcctcccagagctccctgacccaggttccccactgggcctgagccctaggccatgggacccccacttcccaggaacctgatgcacccgagaggtggccacatctcaaaccagtgagtcacggggggttcctccgggtgtgaggtctgcggaggtgggagttggggtacagccccccgcagccaaatatgactctgctcctggccctgccagagccgcagctagggctacagggaaagcccagagggtccacccagggacaaacccgtcacacctggtgtttggggtcaggtgttcacatttctaaagcaaattgaccagtgggagaggaaagtgggcttttagtggagtcaggggcagcaggccaaaaggccaccccaaaaaggcactggctacccccccacatccagcgtgtgtttgagtttaggctctggcttaggctccgggactcactggccgtgtattttcccggctcgtcagttttctccaggatgaccttcacctcctggcactggccacttatcctggaaaacagaagccccctggcaaagcggccctgacctgtgcctcccccggccctggagcagccacgctacaatgccctgcaaaggtggccctgagtctgccacaggcccatggaggaggatgcttctctgcatctcagacccaggcaccagcagcccctccgggtcacacatggcagttcccggggtctcctgaggtggccaggagctctgcatcgctcctcctggtggctgccttcccaacccccccgcccccaacacatttcctgccagatgcacccgggctgcctggtttgtaggcagtgtctgtggcgtgggcctgagcctcatcccaccagctgcattcttccttttagagacattcagggacaggccccatacccatcatcatctggcccagagagggaaaggttcagtgaggggcttttggggaaaaaaaaaaatcagggtcattgccagggtcagtgacttcctaagggtcagcccccaggaccggagcacaggcactgcatgccactcaggtgggagccacgcgggtgaaatcacacaggtgggaagtcacagatgtgagccacgcggatggaagcagcacaggtgagagccgcacaggtgagcgctacacagggacttcaagggggtcttctccatggtgtcctatgccccctcttggtcattctgcaagccccatccctgcgcttctccaaagcagaaatttactgccaagactacaagtctagagtctgtaagccctgcctgctggctctgactctgatcgggggtaaacaccttttcccaaaggggcctgcacggcaccacacattccctagtcggaggaggtggtgggtggtacccagcactgcccctgatagcccacaggggcctctactccctcaggtcccctctagctgaggcacctcactggcacagtttgccctcaagcattgcctgagcaggcagggctgagagaggcctcccagcaggtctgcccacctccccagcaccagagctctcctgggtggggaaagggaaggccctagaccaggttgcaggctgcccggccggctggcagacactcacagcatggtggccttagcttccaggttgcccccttccaggattgtgagggtcatgggtgtcaccgattccagattcatctcagggagctccctgtccaccgtcatggccttcagataccacgtccctgacacctggagaaagttcctctctatcaggctcaggctgaccgctccagagcctcccccttccctggcctgcagcccccagactctaccgcaccccaagggctggagatggggaacattccccaatctaatccacccagaaaacacccagcaccctcgccaggtccacccgaaggctccagcccccgcaagttggccaggaccacaggagccctcacccccaggagagaagtgaagtcagccagacccccaccctcctagccctgcccttctgcaccccggccccctcccagcccagactcctgctgtcccatctcaccatctttcagggcagggctttaatgcccaacctgaaaatgagggtctccttggatgggggagggatgtggtctccatccagcagtctcagcctcgccccttgccccctccagcccagccttcccatccgggcctcacatcctgaatctcctcgtctgaggccaggaggtggtgggcctgcagggcagcaatgaggctgaggctgatggccaggagcaggggcttcatctctggtgtctgagttcacggccgcctgacagttcacttgctggggctgggagagggtgtgccactcccacagccgccctttttacagctgggctcaggatcccctggggacctagcacaggtgactgaccaatcccttcctggatgtaaaccacggccagttctgcaacggagcagataacgtgccattgttgctggaggctggtgaataacagcttgttaattccagaggatcatccggacaggaccaggtccagaggagcgggtttgcagatttcacctgggaggaaactgaagggagtgaagggcgtgcaggcctcctggggacatgtgcggcagtaacaggcgccccccagccatcccacatgcgctgatgtgcacaccgtcaagggggtttggggttggagtccgagggccgtgggcctggggctcggctgagcttcctgcatctctgggcaggttacttggcctcagattcatcatggaaaaaaagggaccctcctgtgtgaacacgataccgtgtgcatttaaggacggtgtccactgtcctgagcaaggtgtgcagtaacgaccctctctgctccacacacagagcagcaataggtcagacagacagaagaccaagacaggtgtgtgtgtgtgtatgcaggtgtgtacatatatacatgcacacacatgcacaaacacacacacactcacataaaaccaggaatggaggagaagcacaggctggtgatggggcagaggcaggggcctgtcagttccaagtcccaaggcaggcagagagggcctagatccagctcctgggagtgatgggaggggcttccctgactccagaaaggaggctgagaaactctccttgacacatcccagggctgtaacttcttataacttagtggagcactgtgggcataggaaggcaagaggacatcgacacagcctcaagggcagaagctgagacaagccgtcctcagaaagggtgactttatctgtgacatcctccacatcactgcagagcagaagcctgggacccggggcagaggctacgaaacactgctagacagaggacagtgacaacaagatgtcggagaaaggcagaaatgcagagactcaatatccttgccttgaaataagctagaaaggccaggttccaaattacccaaggcaacaccacaccaagaaaggcaggctaaaaatgagcaattggtacaggaacttacaccagctaaggaaagtctgacacacactttaaaactgcaggagtatgatcaagatgcctagcattttaaaaatatataaagtataaaattagaactggccagaatataagaaacaaggagagatgaaatagaaataattacaaatcttgaagatgaataacaaagtgaataaaaaaactcaatagacaggttaaattccagacttgacatagtagaaaagagacttagtgtcatggaagatagtaccaacaaaatcaatgaagacagaaaaattagaaagagaaattgaggtgttacagatagattcagtctccatcctggagctagtaataaaatgagtggaggaaaccatccagagtgcagcagctctgaaaacacaacacacacagatatacacacacacatgcacacacacatgcacacacacgcacatgtgcacacatacaaatgcacaccccccatacacatgcacacatacatgcacacacacagacatacacacgtacacacacaccatgcatgcatgcatacatacatgcacatacatgcacacatacgtacacacatgcacattcacacacatacacacatgcacaaagttaacacacgtggagaatagatcaggaggctccaatataaacagaataggagttccgaaagaaaaacattttctaaaatggcaacaaagcaacggaatagctcagaatttttcagaattgaaaagacatgagatcccagatctaaattaccaaggaatgataaaaattgagaaatccactcctagaatattacagtgaagtgcagatcacccaggaaaggagaaaaaaagtcaaaacgaccagaaagaagagccacactacataccataaaagcggatgtggactgatggcagacttctcaatagcaacgctgccttccggaagacagtggagtgacatctttaactgacccgggagaaatcacatttacctgtgaatgttattctcagtgcaactttcataaaatattgaaggcaaaataaagacatctcggacattaaaaaacaactgaggcccagcgtggtggctcacacctgtaataccagcactttgggaagccaagacgaggtcaaaagttcgagaccagcctgaccaacatggtgaaaccccatcttgactaaaaatacaaaaattagccaggcatggtggcgtgcacctgtaatcccagctactcaggaggcaaaggcaggagaattgcttgaacctgggaggcagaggttgcaatgagctgagatcatgccactgcactccagcctgggcaacagagcaagactccatctcgaaaaaataaaaataaaaattgaacaacaacaacaactgagagtgtctaccactcactggtctccatcaaagggagtttgaaagggagaattttagcaagtctataggagaccgaggtcgggggtataaatgatgtcagcaaggcaaactacctgctggctgtacaaacatgaatggtgcagactttgatggtgggggaaaggttctgttttagtgcatatttaaagagtgctaaatgcacacaaaacacacttgtgcccacacgcatgggttcatacgaacaagaatgcacacaaaacacacttgtgcccacacgcatgggttcatacgaacaagaatgcacacaaaacacacttgtgcccacacgcatgggttcatacgaacaagaatgcacacaaaacacacttgtgcccacatgcatgggttcatatgaacaaaagatgcacgttaagcacgggagaatagtgatccatggagagggaagtggaaaggggtgggcagggataataaattttcaaaatacataaagaagcctgttagacaaaagcatgatttacttttcatcagtatagatgaaaaggcagccaacatgaaaacaattaaaagcacaatcacaagaagacgaatgttcatgaatgtgaaggcatactgcatcgaaatacaagaagccaaaacagactgaagaacaaaggggtcaaatacacagttggaaggggagatgtcagaacttctgcattagaaacagagggcgagggtgttaaaagttcacacccatgtcgaaatttggaaccaacattgtaaagtatacaaagacactgcctcaaaaggtaaacaattatattgttataattgttacaatgaacaattcttaattgctaattcttattaaatacacatggaatagttttaaaataggccacataccaggcaatatggggaacttcacagaactaacgcagcagagcctgccctttgtagctacaatgcaataaactagaatcaacaatgaacagagtgttacataaagagaaatataaacttgaagtctgcagccttaaacgcaactattatacaataaagacgtcaggacagaagtcctagctgtgaaaagttctcggtcatgaacacgcacgaatgcccggccagctctgcgctccttcgtcaggacagaagtcctctctgtgtgaaaagttctcggtcatgaacacgcacgaatgcccggccagctctgcagtcctttggtggtcacctcgcaaaggagaattgatcggagctgctgcttacggggtgacacccgtggcagcatcactacacgcacatcgtgacggcaaccgcgtgtgtcatgcagcccccaaccgatgatgagaaaccaacctgaacctcacgtcagagggaaggctgttatctttccattctctttaagaaaaattattttaacacgaagcaataatcaaggggtagcagccaagagatatagaaaaaataagtttgacagaggtatcccagggagtaactaatcaaatcttgtttttttcttccatttgatgatgtttagtgcacctatcagctttttcatgtgcgagccttgtgattgttttatcacttcaaataaatatttattttcatatctaatttggattcatattgctattattatttaaagtaacccctaaagtttacatatattttaagccccacaaaatccatctactcctgcctatatctgtgagtttaatttccttttaaaataatctgaatatataccaatgagattttcttttttttaatttttatatatatatttttttattatactttaagttctagggtacatgtgcacaacgtgcaggtttgttacatatgtatacatgtgccatgttggtgtgctgcacccattaactcgtcatttacattaggtatatctcctaatgctatccctcccccctccccccacccgatgacaggccccggtgtgtgatgttccccttcctgtgtccaagtgttctccttgttcagttcccacctacgagtgagaacatgcggtgtttggtttttttgtccttgggatagtttgctgaactagaaataccatttgatccagcaatcccattactgggtatatacccaaaggattataaatcatgcttccatagagacacatgctcacgtatgtttattgcagcactattcacaatagcaaagacttgaaaccaacccaaatgtccatcaatgatagactggattaagaaaatgtggcacatatacaccatggaatactacgcagccatagaaaacgatgagttcatgtcctttgtagggacacggatgaagctggaaaccatcattctcaccaacaatgagattttctaatgccgggcatggatgataggtgtttttgttcttggcttgctccctgggtgctgaaatagtcaggattaggacagcggaccatggagaaagtgcccagatgtgctggtacctgcagctcaggacaaagggaggcagcgtgaatgacacgttcttttatttgggttcttgctgctcccacgttactgtcacaatattttctgtggagttgaaaagcaaatgccccaaggcaagcacagagggtgcaggggttggggtgtcccgagggtggggctgtgggcgggcctggaccccctgcactgcggctcctcctctgtccctggggttccgtcctccttggtggcctgcagggcctctgtccactgccgggccaccaactaggctacagagacacggtgacggtcaggtttctcaggtcccccgggctaaggaacacgtgagcctttcagccaccacgttgaccacacatgcgacaaaggcagaggggccgcctggtcacggaggacgagcagccctttgccccgtctcctggaggctggcgctcaaatgagtaaacccagggagtcctgagattcttcctgctcagacacaatgccctagtgaggtcgcttcctgacacgagtttaaaggatgcacacgtgttataaatcttagaaagctggaagaggggagaaaatcacttccaatcccacctccccagtgactcactcgcgagttggaacagtttccttcctgtcttttttctaacagagcatcttacgtggatgcagtgacaaagatgcgtcatccgcctgcgaccgaaggaagctgcgggaagaacacccaagggccttgtggcatctctcctgcgccctgcacttccctggggccaatgccaagggcaaggccagccgtggcgggcagcagcccctctgctggacacggcgcctgccccaaggccaaggctccaaactcggccccctactgagcatctgatttcctgagtccccctccgagggctccaggatttgacctcacatttcccgcccgcctaagtctgtgtgcttttaggcctgtgtggccttccctgtctgtgccctcagtctacctggacgctgccatccttcaaaacccagcccagtcccacctcctgaaggatgaaggggccctgcccgcctggcctccagggcgtcttgggccagggcagccgcagtggtccctgcatgtccccgtcacagagggtgcctgtcctgaaggagtgcagtcatcccaacaggcctcggccctctctggccaccgaggctccctcgcccttccgggttgggctcagcagaggctcttggggctcaactggagtgaaccgagtcgcggatggtggaagtgaggggtacttggccatggaggcccagggcttggcaggggggcccagggcgcattcctggaggggccgcttcccgggaaaggtcgcgctgtgtttgtgttccggctctttcctccgcctgagttcctccgaggccctggcttatctgaacacaggaccctgtgtgccacggcatgcaccatgtcacggtgaatgtcacacaaacaggaacgtgcctggaggccgcctggacctgtcctcccgcccatcagctgccaaggtgatgctgtggacatggccgtccccacttgcttccccacttatggagctcctcatgggctcaacacccccttccagaaggctggccccaggaggggagtcgccggcatctggaagcctggcaggcctccgcagcgtggccagcatggggtccatgagtcagggggtggaagaggccccgtgacatggggaacacactaagctcctagcccagctcttctcctggaggaccggatgccctcgctctgccgctggggaaggagtgcgcagggggcttgaggccagcaaaggaactgccccccaaatcttactccgggatcggcactttcctggaagaccccaggagtaaggagaaggaagagcagcggggagggagggagtcccaagccaggtgccacagagatggggcagcgtgaccctgtccaggtcacctcctgggaaactgaggcccagccaggcagaactgggtctcctggttccagccaccacccaccactcaggcagctgccacctgggaggcaggagatgtctgaggtggggtcttcataccacgagccacatggagggaggccacgatctccgtcctcccacctgcacacacaccctcccccaggtgagcactaggaagccctctctggggtgggggtggatgctaatgttctgtgcagctctttggttcagtgagtcctttttggtgaaagggctcagagatgcggctaaagcctgtgccagccttgcactcccatgaggttgctgttaccctcatgccactttcttgggagaggaaggtgaggctggaaatggtaaggggctgagctcactcagaggctagcacgaccccaggctcacacctgccagcaatgttaagaggcactgggagctgagaagggctgagggtgccacgctggggttggccaggtccaacctgccccctcctttgaggccctctccttccttcctgtgctggcctttggagcccacggtttcagcatccatcacggaccccaccgcacacccaagcgctgctgaggactttaactcctgctttggaattttcagtgcttctgattattcgtagactcaaaatcagaagaggctacttgccctaaacagaacatggtatatttgcattgcagatcattttacatttttaagaaaaaatgcagtttctctacaaagtcatccccctccaaaaacaaaacaaaacaaaaaacctccctagggattttgacagggctgccatcaggcgtgtgactgatttggggataattcccccatccctttgctttccattaccctgtggcccccgcgtccttcagggcaggtggccttgccttgtgagcatcctgcccgtttgggggcatttcctgggcacctggtagagccgtaggtgagaatggccccagtggtactgggcagatgtgagcacagggacaatgttagtgcaggaagtcaggggcccgtcagggctgttggtggctgacgcggcatccattcccctccccgcatccccccaacacacccgcaccctcatggatggtgactgcactccccactccagggcttgtctgattgatctaatggggcgccgtccctctggtctgtgattgctctggaatgagccacggagcccagagaaggaacatgcagagggcatctgagaactgcagcaggggacccagttgggatgaggcagccctggggaccttgaggagagaggcaggaagtgcccagtccttgacaccatccccgaagcctgccccacgcctggactccagccaaggcatgtaaggccaggtggactcagcagtgtgaggcaaagcacggtgcccggcttggatgccacatgtgttgagccagctgtgctgtggacagggcgctgtggacagggcacagcagacaggcgggggatgtaggcatcgggagggggagtcatggctggtgagagcacccctggagcgggaagtgctgggcagcgagaggtcagggaggcatgggggcttgggacggccaccagccacatcagagcagcactgctgctgattcccagcaacatggaatgaggccccttggcaaagtaacagaacgtatctttgaaatggcagcagctgatctttaaaacagaggcaagccgttcctgtctcaaaacgtttaaatcctcaccccaaaccattatgcggctcactgcacccgtggaaagccaacatcaatacctgcgtgcatgctggcctccctggcatgggcattctttgaggttgctggctcaaagcccccagcactgccagagggggaaaccggcaaacccaggaactccaaggctcagctcaacagccacacccttccgtaggccaaaggaagcaagagctttttctttctcactgttctcagggattcattgtttttgtttctgttttttgttttgttttgtgttttgggaaggggaccacgtcacaggttactatagaaacaacgcctgaactagatggatgacgaagctgttattcctcggggaggctcttcaacttgaaccaattgtggggccattctttagaaaacggctgtttttgctctgggaacatttttaaattatttcttcttcctttgcctcagatgggaggagcatcgcgctactggatcacctctaatcattttttcctttttttcttttttttatccaaagcccagctggcccatcacagggtcatgtgtgaaaagagggctccatgcaggtgttcagaagaatgttttcagtttgtactcatctcagaaaatgcttctgaaatgatgttaataaagaaaacaagatgccaatgtgcacattcagcctgggcctcacgcagcctggggaaaatgtgccaaaatgtcagcatggaaaggattcacagtgatctctaatttctttctcagacctttatcaagttcttactatttatgtgtttgtttatggagatggggtctcactttgttacccaggctggtcttgaactcctgggctcaagcgatcctcccgcctccacctcctaaagcgttgggattaaaggtgtgagcctccatgccgggcattactttttaagagcatatataacttagccacgagaaaaacagcagcatttttcagcaacaacaaaagggagagagatgagagaaaggcccccagagctgggcagggttgggggaagaaccgtgggcagtgggagcagcgaccccaaattcagccccgggccccgcctccaggccagctcctggcagggtggccccaccagggtgaagggcggctgtccgcggcctccaggtcaccagcagggcctggcttatgatctatgaacccccggccgatctagaggttagggctctagatggggcggggattcggttagagagggcagggtggaggggaggatagacaggaaccagggaggtccaggcccagtgggggctgagctgagcgggggaggcggggccgagaagggcggggcagaggagtgggatgagcgtggttggggcagggccagtggggcagggtcaaggctgtgttgaggggtagagtgggcgtggtcggagcggagccggtgggcgggacccggcggtgtggagctgcacccggagtttgtaaggatcaggaaagctgcctggagctgggcagacaggctgacccagggaccctgaccacctacctgagcttccacccagcttcaaggctgtggggatcgtttcttagccaaggtgaaaggccctgagccctccagtgggctctgagggtttgaatgtttattctaaatgggctccaacacggagtgcgcgtgcgctcaaggaccagctggctaggagcgccttctctccccgaggggatctggaatgttcatccgcggtcttcccagtggtcctctcctgagcaccctgggcatggggttgggaagtgggcacacttcttcagtgcgtggtactttctgtccctcccaatgacattggtctcttccaaattccccaggcataggaacagccacaagagccaactcacatttcccaaagccctctgggggcacggcagcgccctgggcagaggagagaactgcccagctcagcggggagaaatcccagtggtgctttccgttccccccaggctcgatgactgccatacttaccagctgggggcgctggtgagcactgccagtctccagcgcccgcccttaccccggggcagtgctgcttacagcacggcgactcctaaaggcaaggagttaaaggcacacggatcctagcactttggggaggctgaggtgggcggatcacttgaggtcaggagttcgagatcaccctgaccaacatggtgaaacctcgtctctactaaaaacacaaaaaagtagctgggtgtggtggcgggcgcctgtaatcccagctacattggaggctgaggcaggagaagcgcttgaacccgggaggtggaggttgcagtgagccgagatagcaccactgcactccagcctggcaacagggcgagactccctcaaaacaacaacaacaaaaacaaaacaaaaccaggcacacagagcaagcggcgggaaagccagatggaagcgaaatgggactttgcccttccgagcctcctgtggataaaatgtcaaagctgggcactcccccttgactcaacggggctgccgccccgagcccctttcatcatcctccccacagccctgaaagttctgtaactccactttagggatcagggattcccgactcaggccctgagctgtttctggagctttcactctgggcggtgtgggggagggggcccctgcggccttcaggtctgggcactgtccaggacaccagggctagccctgagtccggccacctgagattctgaggctgccctctcttgagcccacggtgctgactgggggtccctcgtctggcaaactcagctatgggcacaaagtcgggacaacaaaatggtgtgcacagaatgactcatttcatgtttttaaaaaccttttggccgggcgcggtggctcatgcctgtaatcccagcactttgggaggccgaggcaggtggatcatgagatcaggagactgaaaccatcctggctaacacggtgaaatcccgtctctactaaacacacacagacacacagacacacacacacacacacacaattagccccgcgtggtggtgggtgtctgtagttccagctactcgggaggctaaggcaggagaatggcgtgaacccgggaggcggagcttgcagtgagccgagatcgcgccactgcactgggcgacagagcgagactctgtcaaaaaatgaaaaataaaataaaccgttttacagctgcgcatgtgtgtaaaaacaggacacagcacttctgccgccccacgtgccagtaatgctccgactcctttactcctcattcccaggcccaggggcaggctctactgtcctctccattttacaggcaaggaaactcaggcttggggttagagagcagagatggcctgtagtgagttggacaggagcctgggacctttggctccagggtgccacactcccccaacctactgtcccaggtagaggagcttttgggggtgggtggttactttctgctcatctccttccttttttatgtttatgttaattttattttattttattttattttgggacatggtttggctgggtcccccaggctggaatgcagtggcctgatcacagctcattgtagcctccaactcccaggctcaagtgaacctcccacctcaccctcccgagtaattgggactacaggagagcgccaccatgcctaatttttttttttttgcattatttgtagagatggggtttcgttatgttccccaggctggtctcaaactcctgagctccagtgatccacccatcttggcctcccaaagtgctgagattacaggcatgagccaccacacccagcctgtctgcttctatatgactttatttttctcccatgaccatttattactcttttaatcatgaagaaaaagaggcttccttgttggagtccggtcaagcaagaaggaagcatgaaggaggaaagcatagctggggagcagtgtgtgaagttcagtgaccacccagtgagcaggggcgccccagccaggcagttgctcagaagcacagcttcagacacagggacccattctttctagaaccttcccagaggcctgctgcttccaccaggaggtacttgtgatttgtatgagatgtgagttgtccatttcctattcctcgtgaccaaatgtgtcttttcaattacggtcatttaaaaatgaaatgtgagtgaagacgatgattctagggcaatggttgtcaactgtggctgctctgtagaatcatcggaacttcaaaagatactgatgccagccgggcgcagtggctcacgcctatattcccagcactttgggagcctgaggcaggagatcccttgagcctagaagttaagagaccagcctgggcaacatagtaagactccatctctacaaacactttttaaaaattaaccaggcatggtggcacgtgtcagtagtcccagctactcaagaggttgaggtcggaggatctcttgaacccaggagttcagcgctacagtgcgctatgattacgccactgcattctagcctgggcaacagagaaagacccccatctcttaaaaaaaatattgacacctgggccaggcaaataatcacaacgttcaagtgtggcgcctggcaaagggaattttaaaagcaccctaggtgactctaacatgcagccaagattaaaaccattgttttctagagagagggggacatgcggagagggtagcaggaaagagaacagatgtgtttcgcttgttctttcagtatttctttaggctcattaatcaggagtgcttggacacgaagaagggaacaacagataatggggcctacttgagagtgaagcgtgggagtagggaaaggatcaaaaataaatacctatcgggtactatgcttattacctgggtgactaaataacctgtacaccaaacccccgagacacggagtttacctatataacaatcccgcacacgatcccctaaacctaagataaaagttttttcaaatcaggaatacttagcctagtccattttcatcccgaatattgcagttcatttttcatattctacatttccacagatctttaaataaaaacagagcaagaaacaggcacctcaagggatggtcactgttacagcgttcgcctgagacagccacttccgttgagaagtcacagaaacctccacccaggcaggtaccgaggacagcagacccagtgatgatgcgctgaggggcagctccagaggctgcagaatctctttcaacccctgagcgggagcccaagtcaccaccctcagctgacacaggaggaaaacgacgctcagaaggtccagtggcccaggcagcagcaaagctgcgatttcgaggccgacttggttccaaagcccaagcttttaaccgtcacgctataggacaccatgcagtcctccagattcgttatattttttattatttatttatttatattttttcagaattgaataattttatttttgccttaagaaactctaagaaccggcagtggctcacacgtgtaatcccagcactttgggaggccgaggcgggcggatcacgaggtcaagagattgagaccatcctgtccaacagggtgaaaccacacctctactaaaaatacaaaaaatagctgggcgtggtggcgcacgcctgtagtcccagctacttgggaggctgaggcaggagaatcgcttgaacccgggaggcggaggttgcagtgtgccgagatggggccactgcactccagcctgggcgacagagtgagactccatctcaaaaaaaaaaaaaaaaaaaaaagaagaagctctgagaactaacatcaggaatggttaatgaaacgtagaagttaaagtcatgacagggaagattgtagaagtatgaacatcacaacactgggagaaatgaacgaggtttcctatggttgaccagccaggaagccagtgctgctgagttggcatttaactctttagaatatgcacgcgttgacaatacaaaataccttgattaatgtttaccatctttatctttttggtacaataggggaaaatgtggcgtcatttcttcacagcggttgtgtgtgggggatcgttaccaccaaaatcataataatcatttatagtatattttaaagttagtcttgcaagatcgttatggcattttaaaatctctgtagtttgaacattttcattttatcatttcttttaacaaatactatttcaaatagttcctatccagaatatttacaggtaatttagcatagaagcaaatttgaagctaacttcaaagaagaaaaaaaagttcaatagccagagagctaaggataagatagaaaaaccacatagtaattttaaacagcattttgctgcagatttccaatccaatgaataccaggaatgaaggatttttttctcccaaagaagtatttcacatgaactctgaaccttggatatggaaacttctagaaaaactgaagaccctgagacacatgcaagtaagagtcttctggcaaaaatacaatttaattttccagtttccctcctctcaaaaaactccagaggatacctttagtaggcacagagtataatgtcatgttcaaaatttacaaaggacagcagcagcaaataattacgtccctatcattcagaatggatagtttttcattacagaattagctcctggtttgtcataataggcttgtagaaactgccaagttttattatgcaaactaattgacctagtagttgagtctgaaagatctggaagctctgtgcgcatcagtgtcatttacactggtagaagtaattatgtctaactagtgaaatagcattaatgaaactcaaacaaatttccactgataacatttcagagtgcacgctatagtcaaacagcaatgttataaatacctacgcagaaaagaaacagatagggtgattccagagaccacagagtcttaagttataaggtaatttcaaatttcccaagggttggtttacaaaatggtttgaaagtctaaacttacagaacagaaaacagataaatgcacatcactctaccccttggcaagcaaaggatatatatttttttgtcttattgcatgaactgatgcctgataccctcagctaccaacttaagtaacgctgaaacccctaccttcaaatccagcttaccgtcagatgaactatgtatacgtgggaaattatgattaaagctttacgttcaaagtcaagtaatagactatttttaaaaatacatggtaaggagaaaaaagtgtctatgttgaacaactgagaaacacttaagcgaggttacaaatgactaataactatgcacaacaatcttttccaggatcaactttttcctttgcaaaaaaaaatcatttacagacattcaacaagttaattctgttataaatgataggccatatgtatgttccaacctgcttccttttagtactaggacagtgtagtaccggcacttcagtaagtgttaactttattttctaagtgtttaaatatgttttgttttgttttatgaggcggagtcttgctctgtcgcccaggctggagtgcagtggcgcgatctccgctcactgcaagctccacctcccaggttcacgccattctcctgcctcagcctcccgagtaactgggactacaggcacctgccaccatgccctgctaatttttttgtatttataatagagacggggtttcaccatgttaaccagattgtctggatctcctgacctcgtgatccgcccacctcggcctcccaaagggctgggattacaggagtgagccaccacgcctggcctaaatatgtgtcattttcaaaagaagaaatgtgatatttattgttgttaagataaatgggaactgacaagcctatataacattccttacgtagtttctgatcgctataacattgccacaatttgcagatgaaataaaacttatttttgaaggggtaaaaacctaacagatcttgctgaaaggaaaatactagaacacggattcaactatttcaaataaagacttcctattggagattctaagtaatatgaacatttaaaaatatatgccagtaggctcccacctgaaatacataaaagtctcacctatggaatctatcatttacaaggatttatacataaagattcatttggtggctttcaaattccaaatttgaacattttcatgggaatatttccaaccctaagaagcaaaagggaaatctccattcaattccattctctatcatgtgacagccacagaattaaaaatacgtgcaaccggtgaaacccagtctctactaaaaatacaaaaaattagccgggcatgttggcaggcgtccgtagtcccagctactccggaggctgaggcaggagaatggcgtgaacccaggaggcggagcttgcttgcagtgagccgagatcgcgccactgcactccagcctgggggacagagcgagactgtctcaaaaaaacaaaaaacaaaaaacaaaaaacaaaaaaaaaaaacacgtgcaacagaacttttcacatcctcctgtctgcattacagatatttgttttttacccacggagaccgtattgcaaaggtataaagtggtctacccaacaaagtattttacagatgatggcgatgaaagcaaggattaattctaattagctaaatctaattcgttcttcagaggagagacttgtctgcaaggttgcaagggagggtagcaggaagttgctgtccacttggactagcagaatacacaactcaagtggagatttattctgacattttccagaacaactctaaaacttcttatttactctttatgccatctacaagacacaacacacatttattgtctcaatgttaagaaaactgagaagccagcactaaagtgctaacatggaagggaaagttgtaagaggtactagggtatgctaataactccagttttctactctccatgcctgcttcagagagccactgcttctccttctcgggccacagggaaggctgggagtcccccagcaacaacaagggcactccccggcgattctgtcccttccttaaacttcgctccagtcttggtcgacgtggacgcagccgccgcctcattatattttttaaaacacatgaaaagtcatgtcatattctagccatataacaaatgaaccgtttcggatcacaaatcccaaacccagtcaaaagcgtgtagccattgtcttaaattccaagtcattggttcagatgaaacctgtgaagctaaaaatctactaaatccatttttaggaagaagaaaaaaccaccctgccacaaaccagcaaactaatcgcacctgtatgttcacagggatgggatgcgcaaagcaaaccctgccgtgtgaaggcagctgagacaaagagctggccaggtaggtccctgcccggccatcccccgtcacagtacctgctgaggctgcagagcaggggcccaacacgcagacacccaacgtgcaggccacgggcggggcttctgcccaaaaccagctgtaccaggcgccatcctgacacctgcccgcccgggagagcagaacacagtgggagatccaggggcttcttcggaagagcaccgagagatcccgtctcctctgcaggctccctctctccgggccaggcctgcccttcacagcacagagttcacccttagtgtccccaaggccctggacttcttgggtgtgctggtgtctctctgactttctccctttggactttctggtaactctggccctccagggcagctctggtacttgggaagcctctagaaagacttgggcagaggcagcgatggcctaggcccactcaacccagagagctctgaagacacgccctgccttctgggagaactgcctggtgcctcctcaagcagatcctggggggccctgtgtgggggtcagttccctgtcctcaaggagctcactttgactctggggcaaacctagtgtgggtggtcggcatcagccattgtccatgtggggagactgaggatcagaggggcacatccagcctgggaaagccagaccacgcgcagctcttggcattgtcttcacctgctccgtcagcaacaccaccccctggggggcagctgggtgacccccatctcacagcaggggagacagggcttcgaaaagcccctgtgcaaagcagagctgggacttgaggccaccggatttggtgcagaggagacagcttggatccagggacaagctctgccagcagggaggacaggactgggtgatgggagcttagttttggaataaaaaaatctgcaaaggagcctatctgtccagtaagcaccacagaaacagagttcccagtggcagccaccattccttgagggcctcccctgtgtctagcactttccagagttttctctctgattcctccactcagacctagtagggacaactgcagggcctgggctgcaatggtggggctgggctgcagtggtgggctgggctgcagtggtgtgtctgggctgcaatggtgggctgggctgcagtggtcgggctgagctacagtggtggggctggggtgcagtggtgggctgagctgcagtgggtgcagtggtgtgtctgggctgcagtgatgggcctcagctgcagtcgtgtgtctgggctgcagtggtttttctgggctgcagtggtgaggctgtgctgcggtgatggggctgggctagcgcttcacgtgtgggtctctcacgcctggtaaaccaaatgccctgcagcaaggagtccacacaggagcctgccaggggcggctgctgatggctccggcttctgcaccacttgcccggggatgtgggggctccgtataccctagtattgttaccagaaaggagtcccagtccaaaccccaagacagggttcttggatctcagctgagtatacttatactgatttctggattataggctcaacaacaggtggattgtttgtgagttttccaagaaaggggaggggatttttctgaactgagggtccctctcctttttagaccatatggggtaacttctggacgttgccatggcatttgtaaactgttgtggcacaggtgggagtgtcttttagcagctaatgtattataattagcgcataatgagcagtgaggacaactggaggttccttttgtcgccatcttggttttggtgggttttggctggcttctttactgcatcccatttgatcagcagggtcttggtgacttgtatcttgtgatactaatcctgccaacctcctatcttatcctgtgactaagaatgcctaaccccctgagaatgcagtgcagaaggttcagcctcattttacccagtccctattcaacatggagtcgctctagttcactcgcctctgacagtgatgatctatcctttactggggctcagccttcacccactgaggggccctggatggaagcatgtgtttgcttggtggggatgacaagtcgaatttcccagcccctgtgatccagaggctcttccaagacaccgggactggagaggagtggggggcctagatgggggtgggcacgagaggctggtgatggcttcaagaggggaggggcacacttgccaggaagaggctgagtgcagcagagagcagcgggactgacatttgaggcaagggtcctgtggagggaggagggaagaagttggagagtgatgcctggaggccaaggtggcaccactgggcccttccgcagctcctggggggaaactgggttgggcccaggtgagcaggagggaagggagggttcaccctgggagtgcaggatgggtgctggtttagggtgaggacctggggaagcaggagaggttaggagaacgaccacgctgaaagtgaaaccgcctttgcaaaaactctatcaattagaaaaattgtaagagtgagctgagctaacccgcccctcatctttcctttcccttaatgattcctgggcttttgggctgagctaaccttgggagacatttaatttatagtttaaataacagcaggcctcccccaaaactcttctgcctgtgtaaacctaatgaaaagctatgaggcgagagggagaagctaaggtgtagacctctctagcaaaatacacaatttccccaactgtagattggtcttttgagatatcttttcaggttttttgcaggtctgatacccatggctctacctggaacccccaacctcactcctgtgacacccccctaagaagcgatttagcctgcaggaggacagctttgaccctccatgagttcatgtctgccccagccaatcagtacctgttacttggccacccctgaccccccaaactgccttgagaaacccctagctatgagcctttgatgagatgatttgagtacaaactctctctaccatgtggttggcctcatgtctattaaactctttctttactggaatgcatggtctttatttagaaagggagcaggaggaaccccttgggtggttacagagggcaggatgaaatccctttgaaatgagcagtacagaactccaaaggaagagatggggtctgtgtgtttcttctgccacctgaaataattgaaaggttcaaaatccaatgttatagagtttattcgaactctaagtttgacgaccaccactcaaaaaacacagactctaaaggaatgggctcagtgctctgaggtggagggattagggcttcacttaaatgggaaaatacaaggaggtttagcatgattacattttccacataagattggcttatgagttgcagcaatttgtttggttatatcctgttcccttcgggaaaagtatatttaacatactgtcttatggaatttgataggcatggggtcttttgtaccatctggtctgagttgggtgcaagaaaagaaagaagttaattcgtaacaaaaggtcagtaactaagaaagggaaggggtcttacatctggtgccatttagtctttcataacattttacaaatcaagaaaggaagagcgttaatctataattggagaagcaaagttcacagcgacttgctgcttgactagggtgtcagaatcacattctttcaaggctcgaagtaatttaaagttccaacagctttaatctgatgagcttattgtcgacaaaaagagtcaaactctgaaaaatatttgaagagatttattctgagccgaatctgagtgaccaatggcccgagacagagacctcaggagggcctgagaacatgtgcccagggtgatctgggcacagcctaattgtatacattttagggagacatgagacatcaatcaaatacatgcaagatccacattgcttctgtccagaaaggtaggacaactcgaaggtggagcggggaggttccaggttataggtagattcaaaatttttttattggcaattggttgaaagagttattatcactagaaaggagtgtctaggttatgataaggggttgtggagaccaaagttttatcatgcaaaggaagactccaggtagcacgcttcagagagtatagattgtaaatgccactaatcagacttaaggtctgtgttaatgttcatgctggtcagctttgctgaattccaaaagggaggaggacataaatgaggcatgtccactccaccttctcttcacagcctgaaccggtttttcaggttaactttggagtgccctggccaagaggaggggtccattccgatggctgggggagtgggcttagaattttatctttggtttacactactttcaagctgcgaacatcataagccaccttctgccaggtgtggccctggggaggggtcccttaacatgtgataggaggtgccaccacggctaggcagctacttgtcatcaggacacagaagagcctcttggacctggggaaggacctgtgagactgtgaagaggaaaagtcagttttgaatcaaacccattttataaataagaaaaattacaaaacgcttctcagaaggcggcggggtggggggcggtgaggagggggacccagggcacctaaaggctaattcttgctagagtcatttaaattttaacttaaattttctaatgttgctaatagacttaattatctgttcacaccttttaaaaatggctaaacatggctgagcgtggtggctcatggcaaaatcccagcactttgggaggacgaggagggtggatcacttgaggatatgagtttgagaccagcctggccaacatggtgaaactccatctctactaaaaaatacaaaacttagtcaggtgtggtggcaggcacttgtaatcccaactactcaggaggctgaggcaggagaatcacttgaacctgggaggtggaggttgcagtgagcccacatttcacgactgcactccagcctgggtgacagagggagacccgtctcaaaaaataaaaaataaaaaaaggaatggctaaacataaacattacttttacaatcaaaaccatttcaaaggccttacttcactggattctcagccagtgctgcccccagagcagaaggcagctgtggcaagcagaggggcggccccacctccacctggaagattcctgctcagatcctgggtcacctgcccaactgatgatgccccagctgctcctgctgcgaagctgaacccagaacccactcaggtctggtccccactccgcccccagcacccctagtgcggccacgcgggaggatggggcccgaggctgcaggggaggaagcgggtggatcaaggcaagcctcgcctcgcctcgcctcacccatgggtgttggtttttgttttttaaaccaaacagagcagagaggggcaaggaagcaaaaatgactcaagcccacagaggcagcagctctccctgtgctgggcacatgcccaaggctggctttggggacaaagaataatcaaagatgacactttggggctgccctctccccagccctcctgggcaaagtcggtgcgtcccaggagtcagcctggacttgaacctctgacacccgattgctgctggcctggtgcagggacccgaggggcccgaggacacaggaaagggcctggagggagagagcagccggactccgcccaagcaatttaggcgcctgcctcatctgtggtcccccacacccccagctcaccaagcagcaggacaacccctggaaatcccccagggaggcggggcgcagggattgcagtgaggccctgtgcccaggctggctgtgccctacctgcgggaagagtcactccagtccctctgggctggtccaggtgcaaccacagtaggacacaggtcaactccagtgaaatgtggagggaggaagggtgtgcctgcctgctccttcccctcccttgcagggaggggcggttgccctcagcaacagaatgcccacgtgggatactggaagcttcagcttaccccaccccacccctccaggcccggtttgtcctgggcgcaaggggctacttcagagctgccaggcctccacagcaacacattaaatgttctggaaactaggagatgtggcactgctgtacaacggtcaggaatagccatcctgtcctcctgacccggtgaaaaccagcttctgctgggaaggagcatggggtggcgcctggcttttggagtcaggaagaaccaggcttaagtaatagaactgcctgacctccagcttgtctcttcagctcccaggtctgtgctcgatttgggattattgggtggggcacataagaagctgcgttctgtgctctcagggtgctggacgctgtttcaggtaccagtacacaccagagggaagagagtgcctgatggcatggtgattgattttagtggagacagctagacactaaaccaggagttctgtcatgccagttggtgataaattgatttcttgaagatttttccacttccaagcaaggtagaatagatgcacctgtccccacgccctacactaaggacagttaaaatctctgtatatttccctgggtattacacatacatatataactacatacataaacgtatgtatatcaaacactaaaaggtggagagaagaaggcagaccatgtagggaccttgggacctgaggaatgacatgacaggagttccctgggttttctttctgcctcatatatctgtgactgtgtgctggaaaagccagcaacacgaaacaccaaaagacacagacaaaaaccaacaacaacaaacccaacaagttggccctcagccaaaataattaggcaagaggaagaaataaaaggtatccaaattggaaaggaagaacttaaattgtccctgtttacagatgacatgatcttatagaaaaccctaaagattccaccaataagatgttagaataaatgaaatcagtaaagttgcaggatataaaattaacatacaacaatctgtagcatttctataccctaacaaagaaatcaagaaaacaatgtcatttacaatagctacaaaaaatacttgcaaataaatccaaccaaggaagtgaaagatctgtatgctgaaaactataaaacatttgtgaaagaaattgaagatacaaataattagaaagctgtcccatatctgagatcaggtgccaaaaaaaagacatcccatgttcatgaattggaagaattaatattgttaaaatgtccatacaaccccaaacaatctacagattcaatgcaatccctatcaaaatttcattgacatttttcactgaaataaataaaataatcctaaaattcgtatgagggagtaacacctgctccacagtggcacaaagcactgtcaggtgccacacacagcctgttgggacatgtgggccacagtacttccccacctaaagtactgtagaggcccaggagacatgagccagggccattttaactgtcagtaatggccacaaagacccctaaatagccaaagcaatcttaagcaaaaagaacaaagctggagacaatacactacctaacttcaagatatactataaagctataataatcaaaacatcatggtattggcataaaaacaaacagaccaatgaaacagaatagagagcccggaagtgaatccatgcatttacggtcaactgatttttgacagaaatgccaagaaacacaatgtggaaacgacagtctgttcaataaatgatgttggggccaggtgcagtggctcatgcttataatcctagcactttgggatgccgaggtggaaggaccacttgaggcctccctccaggctccggaagagacctcctccatgatcccttgtctaaggggaaggttcctcaggaccttaccgtgggggctgaaggtggccacccctccaggaacttatgccccaggcgctgaatttgggctgcctaagtctgtgtgcgtgagtctgtgtttgtgtgcatgtctgcatgtctgtgtgtttgcatgcatgtctgtgtgtctgtgtggtctatgtgtctgtgtgtacacttctgtatgtctttctctgtgcatttttgcatgtgtctccatgtgtctctgtgcatgtctgtgtgtctatatgtctgtgtctttgtatctgtgtatctgtgtctgtgtgtctttgcgtgtctggtgtatgtctgtgtgtgtgtgtatgtctgtgtatgtaacggtgtgtctctgtggcggggggtgtgtgtgtgattgtgtgtgtgtgtgtgtctgtgtatgtaatggtgtgtctctgtggcggggaggggctgtgtgtgtctttctgtgtatgtgtgtgtaacggtgtgtctctatggccgggagggggtatctgtgattgtgtgtctgtgtgtgtctgtgtatgtaatggtgtgtctctgtggcggggaggggctgtgtgtgattgtgtgtctgtgtgtgtctgtgtatgtaatggtgtgtctctgtggcggggagggtgtgtgtgtgattttgtgtctgtgtgtgtctttctgtgtgtgtctgtgtatgtaatggtgtgtctctgtggcggggaggggctgcgtgtgattgtgtgtctgtgtgtgtctttctgtgtatgtgtgtgtaatggtgtgtttctgtggccggaagggcgtatctgcgattgcgtgtctgtgtatgtaatggtgtgtctctgtggcggggagggtgtgtgtgtgattttgtgtctgtgtctttctgtgtgtgtctgtgtatgtaatggtgtctctgtggcggggagggtgtgtgtgtgattttgtgtctgtgtgtgtctttctgtgtgtgtctgtgtatgtaatggtgtctctgtggtggggagggggtgtgtgtgatttgaggtggggacggggcctaggcttcagttactcacaacaggacggacaaaggaaacagagtttacccgttctgctaaaaccaagggcgggagggggacggggctgccggcagccctcccagagcccctggcagccgctcacgggttccggaccgcctggtggttcttgggcaccgcagtgaacctcagcttcctcaggacggcgggccagcccagcagctgctggtcccacaagtactcgggggagagcaccttggtgggtttgtggcgcagcaggtacttgttcaggtggctctcgtcgtgccacacggcctcgatgccgttggcctggtcgaccatcatggcctggtggcaggccctggtgagccgctgcacctcttgcaccgaccccccgaagaacccccccaggtagtagaaatcgccctcgtccttggggatgtaggcctgggactggggccggcgctcgtaggtgaaggcctcccggctgcttccgtagaagccggggtgcagggtgccgaacagcggagtcaggatctccacgcccacgtggtcgcggaactccatgtccacgtccacgcacaccaggtaatccacctcgctgaggaagcgccgctcgcagaagtcactgatcatctccatgcggcgcatggacacgtcctgccagcgcttgtaggcgcgcacctccagcactgacagctgccgaccggtccccagcgtcacgcggggcaccgcggccggctggtcggtgaagacatagtagtggacacggtggcccaccatgaagtgcttctccgccgtctccaggaacagcttcaggaaagccacgtatctgcaaggcaggcggacgggggctgggggagccgccggccgtgcacccctgggctgcaggaggcccgtcctgcacccgcccgccagcggccattggaaggcttagagcagcagatgcaccacgttctcctgccctgtcctgagcgagtcctcgggctgcgattcacttcatcctcttcccagcgatgggggaccaccagcaccccctcttactaaggagggctgagggcaggtggctggaggctggtagcaggccgcaggctggcgtctgctcactccccctcagcctggcctgagccacgcctccccacgcagctgcccctcttatggccaggccggccacgtgctccctcattataagctgcacgcgaggcctccacacacccgcctctgcaccctagagcttcctccctccaggcttgaactgcacctattcctaagagtaagtcattcctggcctccgccactgtcgctggcccagctgcccacagctgccgagaagtcaagtatgtgtctgcggttgcctggctagctccctctctggcctggcccagagtcccagggccttgtgggtcagccacttcctttggtgtctggggccaactgctttgcctgccccacctacatctgacagagaagtgaccacggctctgccagcatcctctttctagggtccaaggacagcaaacaggtgtccccctcctgctatctctggtcagtgagcaggaaacatctggagccttgtattgagggggtggctcagcatgacggccggccacagttacagagaggagggggcagcagaagccaccatccctgggtgagacgcagcctctggagaaggagctgggttttaccgacctggcgagcccacgagcccacgagcccacatgagctcagtaagatgctgcatgaatgacctttcccatctaccctctgggaggacaaggctggccgccaccccactctgtcttgaacacaaggagagacctcaatgtccacagtcactcgccactgcctgggtctctaccctcggccacctcactgacttacttcttgatggcaaacacagttaacccaatggtggtgttctggagcctgaactgctcgttgaggatgtcgatgttgaatgtgccctcccagacaatgggagccagccaaggggtaccacgaggacatccttcctactgcacatggagagaggcgtgcggtcacatggagctggcagggtgccacccacatgcgcctctggcacacggccgcccccacctggaaactccactcagcttctgcctcctctgaccacccttccagaggcagccgcccttccccgggaaaccaaccagaggcaaatgcgactccaaccgggcaaatcattcccagccctccctcaacattggacctgtgggaacacacagcaagctgagctttgctggcaaagagataggaacaaaccctccccagcacccaacccccgctgcccctccccaggtaggaggtacctatcaggcctttgcaggggctttggagaacaaagggacaggaaacaagagacgcaagtcagagaaagcaaagggaaagaggacagccatgtgggcctctgaattcagatgtcaggagaatctgagaggagagaacggggaagcagccccaactgagatttacatcaaggaaaccgccctctaataccttcagaacagccccttgagctgcgttcagtttcagtgtcagtaactttactcaccacggtgtcagcacctttgactgggggtagaccatcctgcaagcacaaagcgccgccacgtgagtttgcatggaaagcgtgggatgcaggtaagcagggggtgtgcacagccgctgaaccatgactgggcattgaccctcccgccaaggccacactcccaggctggaatcactgtggttgcttgggggctgtgtcagctcataatcccgggacctcgggaaagggccgaagctcagagtctctgattcagcacttataaactggcaagagggactaagtgacctcaggggccattgctttccacttgacttaaggctgggagggacgtaaggggttgtgtctcaattcactgtgggcagagaggaggctgggtgtgtggcctctgtccctggttgttcccagggaaaggccctgagatgtgcagacctccccacctgggcccgaagcctgctgggcctccttgtgggctgctggcttccagagcccggcttcctctctgagaagtgggagagtgacacctgctccacagtggcacaaagcactgtcaagtgtcacacgcagcctgtggggacgtgtgggccgcagtactgtccccacctaaaggattgtagaggctcaggagacatgagccggggccattttaactgtcagtaatggccacaatttgaatgtccaagatggcctttaaaagcagggagtcagcagaaaacaggaaggaaattctgacacttggtacaacctggatggaccgtgaggacatcacgctcagtgatttgagcccgacataaaaacacaggtaccattgactccacttataaaaggtagttggagtagcagactcataacaacagaccatggaatggtgagctgggggagggaaaatggagttgctattttatggggacagagcttcaggttggcaagatgaaaagagttctggagatggatggtggtgatggctgcacagcaatgtgaatggacttaacgctactgaacactccaaaatgactaagatggcaaattttatgttaagcgtatttcatcacaatttaaaaaaaatcaaaagcagtgtggccagcttggccttgattgcctaggtcagcactgataaaggcccacatcctgggaaacagccctccaaggccccagacagaacagaccagctggtcatcttctttaaaagccaatttgaaggccaggtgccggggctcatgcctgtaatcccagcactttgggaggctgaggcgggcggatcatttgaagtcaggagttcaagactagcctggccaacatggtgaaacgctgtctctgctaaaaatacaaaaattagccaggtgtggtggtgggcgcctgtaatcccagctactcaggaggctgcggcaggagaatcacttgagcccaggaggcagaggttgcagtgggcagagatggtgccaatgcactccagcctgggcgacagagcgagactccatcacacacacacacacacaaaagccggcgacacgcagctggtcaaaactgaagctccagctccatcgtgctctctgagtggctgcaggatgagggccaagtcagggtagagactggggaaggagcggccccctccctcagagccacaggaggaaagaggacctgccccagctcccacatgcttctgtccacacgcacacatgtgccagggctgcaggacaattctgtgacatgggaggcactgaagggaggcactgacattataccttggcaacgagacatgctgcagatggtcaggttccctaacagccatgctgcagaatgagaacacaggagatgaagtttagtctaggagcaggatttagggcacaagtgcatggaagccacccgagggtcccagtggaagggacacagcgtcagcctggagtgtggagcagaggccaccagaaacagtcacagaacaaccatcactgtggcgatgggcctggcgtgggcccgtgtgccagaccctgtaacggccaacgttgcagtctgaggtctacgttcggggagcctcacagcccacacattcaccagacacgtcgaagccaaggccgggcagagtggagtttcagaacatgtctacaaaccatgaggccccctcccatcaagagatggggtctgatattctgtgtttctaagaaataaatgcagcagaagtgacgctgggtgacttctgaagccaggcccaaaaggtgatctggcttctgtctcatctttcttgggatgttggtcttggagcctcccaaccaagctgagcaggagcccaggccccagggagaggccctgggtaggtgtctcagatgacagccagcatcaactgccagagatgcagggaagtctttgcagtgaccccagccactgtctgcccatgactgctgaggccccaaagtgaaccacccagctgagcccagtccaccccaggaagcccagggagagatagtaatcaatgattgtgattgttttccatggatggagtggtgtgttctgcagccatggatcactgacacgagtgggaattagcagacacagcaggggagagacaagagtggtcccaacagaggccatagcacaggcaaaggcctggagtcaggacagtatggcaggtggacgagtgacaggccacgttggctggagcacagagggcgagggcagaggagggagagatgaggctggggaggtcaggaaggcaggatcagaacatggagagcctcctaccttatgttctggaaagatcactccagctactgtgagaagaagggggacagggctgatggggatggggagacaagtctgaggctgtcacagagatgagggcagccccaccggagccctggagcaggacgtcgaaggcagggaggccagtgggcacgcgagctgctgaagagcagggctggcaggatttgggaacccagtgtaggggtgagagcaaagggagagttgaggatggctggtggaggaggggtggggatgggggagcagagaccatgcatgggaactctgggtaagcctggagttggagactggaggtcagaagggaggtcaaggctgactccagaggtatccaggtgacccttcaaggccacagagttgagcatgtctacactgggcagagcatagagagcgggcccaggaaggggagggggagttcccagagtgggacccccgcccacagccagcaccccggccagcatggatgctccacctgctcttccctgcactcaccagaacccccgttccaggcttcctggcattagacttctggggcttaggaacccgtaactgcagaaaggaagtgtgccaagactcaggacacagaacgaagactgcctgttggtcccttcctccaaaaagtgcatggtgcggccagcagcgtgagcacaagagttcccggtgaagctgcaaggcctcgaggcaggtagggcaagttctcagcaaagctcaggcgcctcgccacgtcccacaccgggaggtgggcaggagggtggtccctgggatattgctcacgtatgggcacctgctggagctccagagccccagctccctcaccccccgccaccagtgccttgatcagtgcagtccctgaggccacgtcagggagtgtttccaggccgtgtccagagatgccccagtagaggtgacaggtgacttcactcttggttctgggaccttctgtgtctggaagcgactaacagcttgggacccagaattgccttccccacccccagccacgcaattgtgggcaaggggcttgctctcccagccccagactccacacttaggaaaattttaaatgggagtgagatgagcctgttgcccaggtgaggctaaaataagggagcaagtaagcacaccctccgccagagctggacgcaggcaataactgtccttaggaccctgataactgtgatacttggggagctcagggaggccccatgggtctgattggctgctgtggtcacttctccccaaaccaggccagcctcgatggtcaaatgtgtcttacccaaacaagaccaagacaagcattattaggaaaaggatcataggtcgaagtgcgtggcattttggttttcctggaaaacaggagtagaaaaatcacatcactcaccctccttctctcacctgccccactttacctgtcccgccttgtaattcaggcatcacaccctgcgacgggccttcatctgccaagatggtccctctgccccacaggtgatgctctgagccccacctgagcatctccaaacccagtccagatctggccctcctcccactcagagaagagggaggcggtctgctcctcccagctcatcagcccgactgctcctgcagactctgagagccaccccggcttcccagtgacctccttccactcagcacccccttcccctgggagaccggaatgaaccacactgaaatgagcacgtcgaggtcactgtcgaacccaccgagggaggccaggacagcctcatggccaggctgagccaggagcccagaccagttcctgccagggagaggagccaccaacttcccctagtatctccctgctgtctcagaggctcatgttctggaaacaatcattgtctttaaggtgattttatgtatattaaagtcacgtacagtagtgcccttatccacaccttcgcttgctggagtttcagttacccatggtcaaccaaaggccaataataggtgagtacagtacagtaaaatattttgaggacaggcatcgtggctcgtgcctataatcccaggactttgggaggctgagccagcagaattgctggaagccaggagttctagaccagcctgggcaacatagtgagaactcatttctatcaagaaaaaaaaaaaaaaaacaattagctgggcatagtggtgcatgcctctggtcccaggaggctgaggtggaaggatcacttgagcctaggaggtgaaggctgcagtaagccatgatcacaccactgcactccagcctgggtaacagagcaagaccctgtctcttaataataaacaaaactacaacaacaaaaaacccacaaactaagatatatacacatttttttttagagagaccacattcacgtaacctttattacagtatattgtttttgttgttgttgttgttttgttgttgtttttgagatggagttttgctcgttgcccaggctggagtgcaaaggggcaccttcggctcactacagcctccgcctcccgggttcaagcaattctcctgcctcagcctcccgagtagctgggtttacaggcgcccaccactacgcctggctaattttttgtatttttagtagagacaggtttcaccatgttggccaggctggtctcgatctcctgacttcaagtgatccacccgcctcggacagtatattgttataattgttctattttactattaattatggttgttaatcccacccggtgcctaatttataaattaaaccctatcataggtatgtgtgtacaggagaaaacatactctctgtagggtttggtactatctgtggtttcagacatccactggggatctcggaacctatcccccgcaggtaagaggggactatcgttttcacaagggcaagcctgaaaggcgtctatctcctggcccagttcctattccttcccccgaaatcagtccctttcaactaattcatctgttacttcttatcttataatgcttgtgtgtgtttacctccacctttctaagtcctgtgaccacggagcgatttatctcgaatagcttcttgaaaccgaaacgtgggaggcaaaacatttgaactttacatgtcctaaattattttttccatttttgtagttggtagatcgtttggctgtagggaaatcttggtggaaataattttccttcaatgtggcaaaaatggttccattttttaaaactttgaaaattaatttaatttgagggataacttacatccaataaaatgtgcccactttaggtatacggttttgatgagtttcacacaatgtatgtacacatgtaatcaccccagtaaggtccctcctgaccctgacaaccatggatctgattccctggcgtttcccatacacggaatcctctgatacatgctcttttatgtctggctgcatcacaccgcatgctgttttgaagattcacctatattgtcacgtgtatcaatcgttcgttctttttcatttctgagaagcacgccattgttaatccgccacaattcatttattctgtctcctattgacagacactgtggttttttcactgttcggggccactagcaacaaagcttctgtaaacactcatgtgcaggtatttgtggacctgtgttttcatttcccttgagtaaataccaaggaatggaaaagatgggtcatatggtaagtgtatgtttaactttgtaagaaactgccaaactgtgttccaaagtggtgactgaattttccattcccgccaggaatgtacgagaaccacagtccttgccaacacttgatggtcactcttttatcctttagccatgctagtggatgaggagtggtatctaagtgtgtccaatgactaaggaggtaaatcatcttttcatgtatttattggccatttgcttgcttcttatgaagcctgtccagatctttagctcattttattatttatttatttatttatttacttatatatatttttggggggcacagtcccactccagttgcccaggctggagtgtggtggcatgatcatggctcactacagcctcgacttcctgggctcaggtgatcctcccacctcagccttttgagtagctgagactataggcatgcaccacatctagctgattttttgtggttttggtagagatggggtttcaccatgttgcccaggctggtcttgaactcctgggcttaagcaatccacctgcctcagcctcccaatgtgctgggattacaggcataagccacctcacccggccctctatttttattttttttagacaggatcttactctgtcacccaggttggagtgcagtggcacgatcacagctcgctgcaacctcgaactcctgagcttaagtgatctttccccctcagcctcctgattaggtgggactacagacatgcaccaacatgcccggctaattattctactttttgtagacactgggtctcattaagttgtttctctttttattattgagcagaatttatttctatattttggatacaagtcctttgccaaatacaaatattacaaatattttctcgccaggcacagagagacagacactgcatgttctcacttatctgtagtatcaaaacatcgaaacaattaaactcatggagatagagaatagaaggatggttcgcagagacttggaagggtagtggcaggggtgagagggtatgtagggatggttaatgtgtacaaataaatagaaagaatgaataagacccagtatttgatagcataacagggagactatagtcaataataatttaattgcacatttaaaaataactaaaagagaggtcgggcacagtggctcatgcctgtaatctcagcactttgggaggccgaggcaggtggatcacctgagatcaggagttcaagaccagcctggccaacatggtgaaacctcacctctactaaaaatacaaaaactaaggccaggcgtggtggctcacgcccgtaaccccagcactttgggaggccgaggtgggtggatcacgaggtcaggcattcgagtctagcctgaccaacacggtgaaatcctgcctctactaaaaatacaaaaaattagctgggtgtggtggcgcatgcctgtaatcccagctacttgggaggctgaggcaggagaatctcctgaacctgggagacggaggttgcagtgagccgagattgcaccactgcactccagcccgggcgacagagcgagactccatctcaaaaaaaaaaaaaagaagaaaaagaaaaaagaaaaaaaaagtttaaaaatacaaaaactagccgggcgtggtggtgggtgcctgtagtcccagctactcaggaaactgaggcaggagaatcacttaaacctgggaggcggaggttgcagtgagttgagatggcgccaccacactccagcctgggtgacagagcgagactccatctcaaaaaaaaaaaaaaaaaaagaataaaaataactaaaagagtatagttggattgtttgtaacacaaaggataattgctcaagaggatggataccagttctccatgatgtgaattttccattgtatgactgaaccacaatatctcagggaccccataaatatatacacctactatgaacccataaaatgaaaaacaaaatacttcttagaaaacaaatattttctctcagtcggtggcttatttattcatttttccttaatttttcttttgaagggaagtgttaatttttataaactctaatttatccttataaaaatgaaaccatttttatggtttgggccttttttttttttggctcatctattaaatttttgcctaccccaagttcatgaacattttctcttattttcttcagaattccataatttttgtgtattgtgtgaaaggctaaagtccctttcttccctcaatggatatccagtcatttcagccatttgaattgaaaatactttcctttctctatcacattaccttagcacccttatcaaaaagcaactattaaaaaatcaattgactatttctgtgtaggtctatttctaaactctgcattctattccattgaactatctgtctatcctaatatcaacctattctgattactatgtaaaattttagaatcagctgtcaactttacaaaaatttcttctggggttttaagtgagattatgtggactctgtagatccatctggggagaagtgacagtttagcaatgtaagtcttccaatccatgagcatggtatatttctccatttatttatgtcttctttaatttttgtcatcaatattttgcagttttctgtttttttgtgaccttctttttcttttttttttttttttgtcagggtcttgctgtgtagcccaggctggaatgcactgcaatctctgcctactgggctcaagtcatcctctcacctcagcctcctgagtagcaggggctacaggtgcatgccaccatgcccagctaatttttttttttttttgtagagacagggtctcactatgtcacccaggctggtctcaaacttctgggctcaagtgatctggccaccttgacctcccaaagtgctgggattacaggcatgagccatggtgcctggtttatattgcagttttaattgtatagacatttctcctaatttggtaaattattctctaaatatttcatgttttatgatgctactgtaaatggtatttaaaatttttcatggttcaattgattgtggcaagtattatagaaaaataattgatttattcttgtttttcttttttctttttttttttttttttagactgagtcttgccctgttgcccagtctggagtgcagtggtgtgatctccagtcactgcaacctctccctcctgggttcaagcaattctcatgcctcagcctcccaagtaggtgggattacaggcataccaccacactcaacttttttttttttttgtatttttgtaaagatggagtcttgccatgtgggccaggctgctctcaaactcctggcctcgagtgatctacctatcttggcctcccaaagtgctgggattgcaggtgtgagccaccacacccagcctgatttattcattgactttgtatcttgagaccttgctaagctgacttagctgatgggctcacagcataaacatatataatatatatgacaataacagcataaaggagcaaggaggcaatgaagttattatatatactggagcaaggaaaggtcaccagacaataacttgaatatacaggaagaaatcaagagtaaagtcagtgataaatatacagtgtaatataaaagacttgaaaagtgtttttctccttacttgtcttactgaattgaaaagaaataagattgtgtgaaacaataattataacaccatgttgttgagtttataacatatatagatgaacatatacgacaataatactacaaaccacaagcaaggagggaggaaatggagttatactggagtcaagttcctgtattttactaaaattagtattaatctgaagtagatcctgataaattaaaatgcatattgtaatccctggagcaaacactaacaaaataactttaaaatatacacttaaaaagaaaaagggaatttaaatgctacactagaaaatacttaatacaaaagaaggtagtaaaagatgaacagaagaacaaaaaggcataaaacatagaaaacaaattgtgaactgatagatggaaatccaaccacagcaataataacattgaatgggaatagaatgaacatgccaatcaaaaggcagagatcgttagactggattttttttttaagctttgactatatgctgcctgtgagagacatacatactttagaaacaaagatacaaataggtcaaagcaaaaggatagtagatttgctatgcaaacagccgtaagggagcttgaggagaaatgctaacgtcagactaaataatttttttgtttttttgagacagagtctcactctatcacccaggttggagtgcagtggcacgatcttggctgactgtaacctcagcctcccgggttcaagcaattctcgtgcctcagcctcccaagtagctgggattacaggcacacaccatcatggctggctaatttttttgtattttcagtagagacggggtttcaccatgttcgccaggctagtcttgaactcctgacctcaggtgatccacctgccttggcctcccaaagtgctgggattacaggcatgagccaccccatctggccaacttttttaagatcaaaaatcttactaaagagaaacattctgccatgatataaagtgaatacatcacgaaaatataacagacagaaatatatacatacctgacaacctagccccaaaatactagaacaggaattaaaagaaattaaaaactgtgtaagcaaaaactcagttgtatgtaaaaaaccaattccccttgaggaagagaaagggctggagtcctttaaaaattaactgtctgtttttctgtggctagtgagccttatctctccctttcccaggcattgcgaagactctgtttctctagctgtgcagctgcaaggtcactaaacagataatcttgagtcataaaacgtgttgttccttgaaaagtaagaaataatgtaatgcatgtcttaactgaataactgtctttgtttctcgcttctgtaatactcttccccctgcacaaatctccccccaccccacaaaatgcttaaaaggtagcttgactctttgtttggggcccggtcctttggatgttaatctgattgggtcggtgcgcctaaataattaaataattcctcctcaaccccatcggtctctctgattccttaattatcccgcagcaatacatgaagcaaaaactcacagaattgaagggtgaaacagtcaattcaccagtaacggttgggccaggcatggtgactcacgcttgtaatcccagcactttgggaggccgaggtgggtgggtcacttgagcccaggagttcgtgaccagcctaagtaacatggcaaaaccctgtctacaaaaaatgcaaaaatcagctaggcatgatggtacttgcctgtagttgcagctactcaggaggctgaggtgacctaagccttgggaggtgggggctgcagtgagctgtgatcataccactgcactccagcctgggtgacaaagtgagactccacctcaaaaaaacaaaacaaaacaaaacaaaaacaacaaaaaaacaataattggacaccaaaatcctaccccactctcaataatggatagaaaaattagaaagaaaatcagtagatacaaatgacttgacatcactggacaccaactgacatctctagaacactccacctggcaagagccgaagtcacgttctcctcaagtgcacatggaacagtgtccaaggtcaatcatatgctggaccataaaacaattctgagaaattcgaaaggactgatatccacagagtttcttctctagccacaggggaatgaaatcagaaattaacaaaagaaatttgggaaacctataaatacatagaaattaaacaacataattctaaataagcaatgggtcaaagaagaaaatcaaaagatacactgagctgaatgaaaatgtaaacacaacataccaaaatttatgagatataactaaagctgtgtttcaagggaaatttatagctgtaaatgtctacattagaaaaaaaatcttaaatcaagtgtgtaagcttccattgtaagtaactacaataagaaaagacagaacaaattaaacccaaagtgagaagaagggaaattaataaatattagagtggaaaccaatgaactagagaacagagagaaaaagataaagtaaaaaaaatcaaatgtcagttctctgaaaagatcaagagaattgacaaagctttagctacattgaccagagagagagagaacacaaataactaaaatcaggactaaaagaggagacagcaattccaatcttacagagattaaaaggatttcaaggaaatactatgaacaactgtttgccaacaaattatgcaacttaggtaaaatggacagattcttacacataaactagaaagcggttagaagaaaatataagattaaatctttgtgacactggattaagatttcttagatatgataccagatacacaataaaagaaaaagttaataaattggaatggatcaaaatgtaaaacttttctacttcaaaacaccaataaaaaagtgttaagacaaactattgatgattgaaaatatttgcaaatcatatatctggtatatatatatatatatatatatatgatactgtgtatgtaaagaactctcaaaactgaacaaaggagacaactcaatttttaaaaaggcaaaacatttcaacaggcatttcaccaaaaacatatacaaatggctaaaaagcacaagaaaagccacttgccatcatttgtccttggggaaatgcaaatcaaaactataatgagataccaccttttacccacaagaatggtatgtattgctgcagatgtacagacagtggaaccctcagccaggcgcagcggctcacacctataatcccaggacttggggaggccgaggtgggcagatcacttgagcccaggagtttgagaacagcctgggcaacatggcaaaaccccatctctaccaaaaatacaaaaattagctggatgtggtggtactcacctttagtcccagctactcaggaggctgaggtgggaggaccaattgagcccaagagattgaggctgcagtgagccaagatcatgccactgcactccagcctgggtgacagagcaaaaccttgtctcaagaaaagaaaaaggaaaagaaaattagaaccgttatacactgctgatgggaatgtaaaatggggcagtcactttggaaaacagtttgctagtttcttaaaatgttaaatcagacttcctgtatgacccagcaattcctctgctgggtatcaacccaagagaaatgaaaacatgttcacacaaagtcttgtacacaaatgttcatagcagtgctgcgtgcagtttaaaatagctaaaaaagcagaaacagccgaaatgtccttcagctgatgaatggataaacaaaatgtggtctatctgtacaatggattattcagtaataaaaaggaattaaatactgatacatactacaacatacatgaatctcggaatcattattctaagtgaaggaagtcagatgcaaaagaccatgtaacacaggactccattcataggaactgtccagaaaaggcaagactggagagacagaaagtgattgtctgaggccaggtgggaatggggaatgactgcagaggagttccagggagttttggtgggctggggatggaaaagttataaaatttatttcacaactctgtaaactaactgaaaataattcatttgaaacaggtgaattttatggcatatcaatgacacggcaataaagctgtttctttcaacggtgccatcaaccccagccccttgaccctaagctgaaggaagagagatgctaggtgtgttcagtagggctccgtcaaagctgattttttgaagttatgggcagcattccgagtaagatgttttgtggcaggtcaggtctcactaacgcaggcctccctaacaactgtttcagtactgactgagtggttaaattaaatattaaaagccagtgcccttataaaaaggctggaatataacaaaatcccaccaagagttttgcctagacctttcctgggccttcaagcatgacaaaataacaaaggaattcttaacaggacccatttaggattaaataagttttattggggatctgaagaaattccccaggactccacaaataagtttactgggggtctgaaggaacttcccaaacccccatgatttaggagacaagataagggttttagattaagtaaatttactgaggatccagaggaaggtcttcaggactcagaccttagttatagattaacataagtcaattacttacgtcttgagatgaatgcacacttacacatagacatatagcttagaaggtatataagctctggaaaactttgtaattttgagttggtctggagataatttccaggtcttctccttgtaactggttacagaaataaaaagtctctttctccccagttcatctgcatctcgttattgggccacgagagatagcagccccaccctcagtttggtccaggaacagtttgatctcttcttggccaatctctggtgagacccaccagaatggaggagagccgggactgggtgcactgccagcttccaaaactcctgcacgtggtctcagtcctccagggattatgatgggtgtgaaggagctgagcattctctaaggagccagcacatgacacccagctcaccgcccaccaaccacatcctcatggtcatctccaaggctctctcatgtcctcttcctgcctttcgggggatcactccctctgactccactaccctgctctcctgcccgccccaacaagcctgactgatttgtggagccgggccttccccatgtgagctcttctccctggcatgcttgtcccccagatttccacacactgggtccctcgccattggtgtccctaaggacaccagctcaccagctcctggctgcaggcaccttctagcacaggcctgcttgttctcatcagtgttcaaccaacattggttggatgactaaatcaacatgcagaatgtgggtaacctgagaatgggcactcatttgccaggtttctcaaagacctaacctcttagtcttcaagacgtttgtcttgggtgcggtcatgggccagagccagtgccagaaccccaggagtatagagaccaactgcccagtccctggtcctccaaggctccctgacatgagaccaactaagacagcataacccgtggggcaggacagactcctggggtggcagctgtgttcatcatcttgactgggtcaagatgtatccagctgtaccttttatgtgcggtttattgtatacatccgttgaaacatattaagacaaaaaagggaaaacaaagaccacaaaggagggacagggaagaacccggaaggcgctggcagcacagggaggaggcaggtgtttgcagtcagacctgagtcccaggccccactcagcccttcctgcctgggaccagagcactgtcccagatctctccaaacctgttttcccgtgggtgaaagaatgacccgggaagtatttaccgttccttcctgagaactcagcgatattgaacacagtgctgcctcacagtaaacactgacaaatggtgagcattactgagggcagggcctcgacctacaccatacccagttttcttcatgaattttccactcctctgcctcccgctcctccagggctgcacctccggggcaggagccctcaccaagtcaggcctcagtatgccttatccgccacctgattccaaatcaaagtaaaacatctctccccaaatgtgtacacagcactcctctaaattaaagggctgtgtgctggctctgggtaccccacccggctctccctggcctttggcgttggggttcactggcctgcagcctgcgccccgtggccctgcgttctgcatccctccctctgaagcgacgttgttgtctgggtaaatactcaattcatcttctggcgccaagaaaattaaggacaggtgatccaccctcggcctcccaaagtgctggggttacaggcctgagtcaccgcatctggttgcctcaataatttcttcttaactcctatatcacctgagggcccggggcacagttcccccgtcacgcttggcattgaacttgcccacctcgccttcccgaggcgcctccgcgtttggggtatggaggctgttcccggtcaacccgggcgcctggccgccgtgcccgagggaagggctggggggcgggcagggcagcccagagccttgtcctagtccagggtcgggcggtaggtgctgaaaatagcagctcatggaaggcggggagcgtggaggggcgaggagaggctggagaccgccacggcgtcgagggaccccgctctcaccaggacccggggaccccggagacgagccccccgccaggccgcgccaccgcgcccatcctccctgcgggtcccaggcacccacagcgcggccaagcccacctgcccgccggctccccaggacgcagggtctcggaggctggggcggcggccggcccgaagcctcgcagccctgagcgcccccaccccggcccggctgtcgggtgcaccccgcattccctgcggtagcggctccctcgcgggcacccggggccgaggcctgcactcaccggccagcgtccgcaacacctcggccatggctccgcgtctggtctcggcctccgccttccgcccggcggccctggggcggggtgagcccgaggcgccccctcccggcccgcgccgcccgccgccccgacttcccgaggccgaacacgggaggggacagaggggcgcgggaggcggccgcgggtccccagggacccctgctaggaagggacggcgcctcctcgcgcgcatccccaagggacccgcgcgcccctcgtggccctggtaccttggggccctgtccccgcatcccgccctggggccgagcggctccgggtgcccctgaagccccgtccccgggggccccttgacaccctgtctcccgggcgggggcgaccccctgacatcctgctcccccggggaggcgggggagacgaacccgtgaagctgcggccccagaacccacgatccccggccttccggctcgcgcgcgccgcagcctgtagccctccagccccgcaggaccctgtgccccgcgcccgcgacgtccccctaggcagagtcgcttccccggccccggctcgcggccccacggagctctgcgtcccgcagactgaggaaccttcgcgttccccctgcgagcaagtccccctccggcgcccgcgccgggccctgaggcctcttcgcgcggtccgtggacaaagccccgctccgccccgctacgacccccgcccttgcctggcgtccgctcgaggaagctcaggagagggcggcggcggctgcagggactgggagagcgcgccccgctgcgaagaggagttacctcccgaagggtcccagaggcttcttcctgcttttcctgatatctctcagaggagtttacactgataacccgttcacaggaccctgatcccgtcccgccctcccggggcaccgttctcatctccgtgaaagctgggggcatctttaatgcttcctttccctcccaccccaagtccagttcgccagctccgagacgtgtccctggtgcaggcgcaggaaaaaattgtggcaattcctcaaaacatcacacagaattaccgtacgaggccgggcgcggtggctcatgcctacaatcctagcactttcagaggccgaggcgggcggatcacttgaggtcagaagttcgagaccagcctggccaacatggtgaatcctccatctccactaaaaatacaaaaattagccggtcgtggtggctcgagtctgtaatcccagctacttgggacgctgaggcaggagaatcgcttgaacttgggaggtggaggttgcagtgaaccaaaatcgcaccactgcactccagcctgggcaacatagcaagactccttctcaaaaaataaaaataaaaataaaaatattattaccgtatgagctggcaatcctgcttttgtgtatacacccaaggaattgaaagggggtctggaagagacatgtgcacatctgtgttcctagcaacggaactcaccatagccaaaagctggaagcagccgtggtgttcaccaaggcgtcatggctgcacggagtgagtctgtctctagatggaatgtttctcagccctagaaagggaggagacgctgacacctgctacagcgtgggtgagccttgatgccttatgctaagtaaaatccagtccaacaaggaaaaatgccatgcgattctattaactttttttttttttttttggcagagtctcgctctctctcccaggctggagtgcagtggtgagatctcagctcactgcaacctctgcctcccaggttcaagcgattctcccgcctcagcctcctgagtagctggcaccacagatgtgtgccaccatgcccggcttatttttgtatttttagtagagactgggtttcaccatgttggccaggctgttctagaactcctgacctaaggtgatttgcctgccttggcctctgaaagtgctgggattacagatgtgaaccaccgcgcccagccacaattccacatatctgagggactggagtcatcaaattcgtagaaatagagaggagaatggtgggcgcctggggaaggcgggaatggggagctgtgaacggtgttgagtttcagtctgggaagatgaaaagagtgttgtagatggatgctggtgatggctgtacaacgatgtgagtgaactcaacaccatggaactgtgcgtgtttaaatagttgagatggtaaatttcatgttatgtgtattttaccacagtaaggaaggaagaaaggggaggatgaaagaagaaaaggggaaagaagggagggagggaggcaggaaggaagggagggagggagggaagttccctgtgggcagcccttaactattcagagggacaagtgggacaagcctgggggctgtgttcctgcccctgagggactctggcccaaggcttccctgcctgcagaccccattccaacaggccacttctgagactgcagagccttggtggtctccaggtccacgaccagggagccccacatggggagggtgctctccactccacccacccatgagctgagggttaggctgccgcccagcatcctggtgccacctgccctgtttgtggggctgagtgttctccctggacgggcctggcacatggaagagctcagtgatcagctgtggatctggtcctctgaggctgtgccctgtaccgtgaaggacaccagaatatgtcactccaaaatgagcctcagaaattatcttgagttgaaggcaactaagatgcagcagaagcagggaaatctctctctgccctgtccctctgctgtctgaggcaggatggaaattataggagagagacgcatcagccagaggaaagaaggcaccctagggctctgtgaatgaaacttccaccttagtttcctcccaatactcaccttgctggtttcccaaacttggaagcctaaaaccgctctcctgggtcctgtcatttccccacacgttgattattctttgttgaagttgctccataacccagttctaagtcactgttctgagttgctttttgttgaagcttcttcagtgaggtgcactacatgcattaatgaactgtttttctcttttgtaaggagccccagctggaaccctaagaggagcagagggaaactttcactcccctaccatggcacagtggcctgccatgttcagggctgggggctagtccgggttctcacaccttttggctgactttctagccccgacccctcgtcccatcagctcactgtttccataaaacatttgtcatggcgatgtgcaaggagctccctgccactgccctgaacttcttccctgaaagcagccagccagtgttcagaggaagggaaggaataaaaggctctgcaaaggagagcccggtcagaccaggaggtgtaagcatgaaaccgatgtgttactcacaagaccaggaggtgtaagcatgaaactgatgtgttactcacaagcggctgggccagggaaggacttggttcagaagagggaacagtcttgcccaaggtcttgcaagcttgtggcccaaacccaggtccagggagacctccattctggtttgcatgtgttggaaacaagtgcttggtgtagcgaaaagaaacccgcacttagaaaatttctcagcaagtcacttttacttctgtagaagggtgctgcctgtgcctgttacaatcccaagagcacactgaacaaaggagggaaggggtttttatccctaacgcagtttctgtttctgtgtccttcccctattggctggggtaacgcagtttctgtttctgtgtccttcccctattggctggggtaacgcagtttctgtttctgtgtccttcccctattggctggggtaaggcagtttctgtttctgtgtccttcccctattggctggggttgggccgcataatctaagctgaccccgacaggctaatgcttaaaccttcccaaataaggtaaaggtgtgatttttgaaaaggttgtaggggtaggatttgtttccaagttatggccaggaagttgaatctttgaagaggaacttagttgtcccaacaatttcccctcttctgttttatagttcttccccttcaaatttatttaacaggagttggctttgttgttcttctttatcatctaggagcaagagcttatctgactatggatggggagaggtgggggaggtttttgtgagagctgcttctatgagcctttgggttaacccacgaatacaaggtatgatacagcagcccacaaggatgagtacacctgtaactgttgcaagggaggtaaagatttaggtcatgagtcccttccattttccaaaccatttctccatgacacctgcaaaggggtcatctattccagagttctcggctaattcatttgctagggtggtaaggcttgtaaggcttttgtgattgtcccgtccagggctgtgttattggggataaaagtgcaacattggaccccaatcatgacacagactccgcctttttttggccaatatcatgtcaagggctatcctgttttcccaggccatctggctggtagggcctaattgttgagctattctttttatggcatctctggtgtaattgatgaatcactgttgattatagtatatataatgtatccagtctacatttttgtttatagtggaccaccagaataatacagactcaaacctggtggctatttggtttcgagctttgaattcattttgtaccccccagcgcaaccccgatactgtctatgtaaatatgagagatcaaaggacccgtgaggggtttctcttttcctttgggttacctgcttcctgtctggttgttgaaatgccaaggtgaaagggatggccaattggatcggagcgcaaatgctgctccaattgtttggcagagtactcaatattggtcccccacaataccactgtacatctgcttggggatggattagggctgactgactggttagctcttggaaaggtttaggcccagtacatcccatcaggtttcccaggaacgtcagattttccccttgccatgagagacatgaggtaaaattggcatcaagagctggaagtcgaatggcccttgggggctgtcccgtagggcttctgacttttgggaaaactggtggttttggcaatttgagggtgtgactcctttggtaaggtggatgtaaggttttagggcggtgcaaccctctgaggaggtccagccctgatactgggtggtctagataacatctccccaattataacataacccctggaaggctcgtggttgtccatcacaagggtttctgatttgtctgaagcgggtggaggggcagaggtacttttctgaagaagctagctgtttttgactctaaaggtctccacagggcatgacaaggcaagcattgaatgtgatcgtttgagggcagggtgatcgggttacattgatgataagatgttctttggtaactaaaggaattaaaaaaaaagacagactaaacccttttgaacattggtttggagggtgttggtcctggagtgacagtccatgactttgcaaggggtgggtccctcctttttcggcctttggattgctatctcagtggttaggagtattagataaggtccttcccaggttggtttgaactttccctctttccgtcttttgataaggacatgatctctgggctggtgttagtgaactgggaattcgaactagggtggagtttgccctagaaggccttgagtcctgagggaggaaagggtggaagacagacaaaatatacatttttttagaaactgatcttttgtttcaaatgtaggaaggtcagtagtggaatttagataaggcagtccatagagcatttcgtaaggggacaggccgagatcttttcgaggggcagtttggattcttagtaaggcaatgggaaggcattttgtccatggtaaccgcgtttccaagattagtttggttaggtgactttttagagtttgattcattctttctaccttccctgatgagggtggatcagggaatatgatattcccatcttattcctagtgcttaggttagccccttaatgatgtgtgcagtgaagtgggtcccattgtctgaatcaatgttctctattagtccaaacctgggcatgatatgttccaacagggctttgactacgttactggctgttgcgcttgggaaggggaggcttctacccagtgggtgagatggtctactattactagtaaatacttgaggaggcctactgggggcatttcagtgtagccaacttgggcactttggaatggcctcaaccctgggttttgtcccccaggaggttgcttctttaagggtttgcttattagcttttctgcacactatgcaaccatctgtcacttgcctagcaagggtatatatccctacacacccacagactctctgagggctgcatcacacatagcttgaggaccccagtgagttccctgatgaagctgtgacaatatttctctcatgaggggtttagacagcatttcccttccatctggtattacccactttccctctgggctctcgttagctcctatgttctttagtttctcttggtctgcacgggagaaggtggggatcacagctggagggggaagacaaggggtgagatggaaaatgggtgcctcttgggaagagacagcttgtttagctatctgatctgcgaagttgtttccccagctttcaaaagatgggtgttcgggggcctaggacatggacaattgcaatttcttctggcagctgaagattttcattcattcatttattgagacgaagtctcactctgttgcccaggctggagtgcagtggcacgatctcggctcactgcaacctccgcctcccaggttcaagcaattctccagcctcagcctcccaagtagatgggattacaggcgcccaacacaacacccggctaatttttgtatttttgtagagatggggtttcaccatgttggccaggctggtcttgaactccggacctcaggtgatctgcccgcctcggcctcccaaagtgctgggattacaggtgcaagccaccatgcccggctcagcagctgaagattttctagtgcttgcataattaattccttgtggaccagatcttggcccttactatttacgaggtcttgttgagtccagatttttcaaaggtaaggactactccaaaggcatacttggagtcggtgtaaatagttccttcctgattctgcagggattttaaggcttggtttaatgcaaagagttcgcatgtttgggcagaccaggcatttggcagtcttcctgactctacctctgtgaggtctccccaacaactaaggagtacccgttgtgcctttttccttcaatgacccgggaggagctgtctataaattggtgaccccctgtttggaaggcggtttcgtttagatccagtctgactctagtttgataactgattagacccaagcagagatagagtcatcaaggttcttggtgtgttgaacaaagaactgaacaaaatgcacaaagtaagaaagaacaaagaaagaacaaacgaaagacaaagcaacaaaagacccggaaagcacagctttattgaaaacaattcacagggtgggagtggctggagcaaacggctcaagagcttcctcaattagggtttttattaagctaaaggaacctggcaacaccccttgctgccctttagaggcctccgattggctgccatctgtctgctgctatctgtcaccaaaatgtgtcttattttagcaagaagtggagcataatctatttaaccaattgcctcctgctggactttgagaatatttttctattttttaaaaaaattgtttttgttttgttttgctttttttgagacagggtctggtctattgcccagtctgcactgcagtggtgcaatcatagctcgctgcagcctccaactcctgggttcaagcaattctcctacctcagccttccaagttgctgggattacaaggcacatgccaccatgcctgactaatttttctgatttttagtagagacaggggggtctcactatgttgtccaggctggtcttgaactcctggccttaagtgatcttcccacctcacgcctgtcagccatcgtgctcagttgttagaggttttataaaaatgaaaaatgtcacatactgtttttccagaaacttcattggcactagtaaggttctagggagttggcaaacactgattggtgaatgactgcagtgggtaaagcttagatgagtgatggtggcagatgaagctgtgactagtgagtgatggtggcgggtgaagctctgattggtgagtgatggtggtgagcaaagctctaccagatgagtgatggcagcgggttgtgggggaaagaaagagcgatcagacagttactgtgtctatgtagaaagaagtagacataagagactccattttgttctgtactaagagatattcttctgccttgagatgctgttaatctgtaaccctagccccaaccctgtgctcacagagacatgtgctgtgttgactcaaggtttaatggatttagggctgtgcaggatgtgctttgttaaaaaagtgcttgaaggcagcgtgcttggtaaaagtcatcaccattctctaatctcgagtacccagagacacaatacattgcagaaggccaggccgcagggacctctgcctaggaaagccaggtattgtccaaggtttctccccatgtgacagcctgagatacggcctcgagggaagggaaagacctgatcgtcccccagcccgacacccataaagggtctgtgctgaggaggattagtaaaagaggaaggcctctttgcagttgagataagaggaaggcatctgtctcctgctcgtccctgggaatggaatgtcttggtgtaaaacccgatcatacgctctaaatactgagatagcagaaaacctccctatggctggaggtgagacatgctggcggcaatactgctccttaatgcactcagatgtttgtgtaaagtcaagcataaatctggcctacgtgcacatccaggcacagcacctttccttaaacctatttacgacacagagatctttgctcatatgttttcctgctgaccctctccccaccattactctatagtcctgccacatcaccctgtccgagatggtagagatagtgaccaataaatactgaggaaactcagagaccagtgccagtgcgggtcttccatatgctgagcaccaatcccctgggcccacttttctttctctatactttgactctgtgtcttatttcttttctcagtctctcatcccacctgacgagaaacacccacaggttgtggagcagctggccaccccttcagcaggtgaagctctgactggtgagtgatggcggtgggtgaagctctgattggtgagtgatggcagcggggtgaagctctgattgttgagtgatggcagcgggtgaagctctgactggtgagtgatagcagtgggtgaagctctgactggtaagtgatgatggcgggtaaagctctgattggtgagcgacgatggcaggtaaagctctgattggtgagcgatgtggtgggtgaagctctgataggtgaatcatgacagtggttaaagctctgactggtgagtgacagcagcaggtaaagctctggtggatgatggcgggtgaagctctgactggtgagtgatggtggtgggtgaagctggtcttagtgtccctgcaggttgtttcagcagccatgagataaaactggcctcctccaactggctaaaccttatgaaggattggcctgctaccaatcagaggctgaagtggagacttggcccatgatcattcagaggctgaagtggaaacatctgtcatgttatcacaagagtgaagatgtggcttgtatgctgcctagaacttggtaggcaagtggttgaatctcagtctctcgggcttaccgcccctcagtggggccaggcacggtggctcagcccataatccaagcactttgggaggctgagg

SEQ ID NO: 339 - DNA, 79238 bp, Homo sapiens
attgtgccacagaaagtaaccatacatagggatcaattgaaaacattgaatgactttcaaaaattactggaaaacattaattggatatgacctgctctaggcattcctacctctgccatgagtaatctcttttctatccttagaggagatcccagtctcacaaacccttggcaattaacaaaggaggctgaggcagagttacagctgattgaaaagcaagtgcataaagctcaaataaatagaatagatccagaaaagatccagaaaagattgatttttccaactcagcattcacctactggtgttgttgttcaagagcaagatcttgtagaatggctttttcttccacatactaatccatggactctaactccttatttggatcaaattgctactctgataggaaatgggagaactcaaattgttaaattacaaggatatgatcctggaaaaatttttgttccccttacaaaggcacaaatacaaaaagcctttataaatagtcttaattgcaaacccatttagctgatttcataggtgttcttgataatcactttccaaagacaaaattatttcaatttttgaaattaactaattggattctccctagaataactaaatttaaacgaattgaaggtgcggaaaatgtttttacagatgggtctagtaatggtgaagcttctaactctggatcaaaaagtaaagttttccagacgccctatacttcagctcaaaaagcagagcttgtagttgtaattgaggtgctgacggttttgagatgcctgtcaatgtaatttctgattcttcatacgtggttcattccacacaattaattgaaaatgttcagttacaatttcatgcagataaacaactgatgactttatttacccaattgcaaacagcagttaagagtagaatgcaccctttttacataactcgtattagaggtcatacacctcttccaggacctttgactgcaggaaatcaaattgctgattgcctagttgctatggcattatctaatgctagacactttgataatttaacccatgttaatgcctctggtctcaaacgcagatacagcattacctggaaagaagctaaagctattatccagcaatgcccaacttgccaaatggtgcattcctcgtcttttacaggagtagttaatacttgaggattggaacctaattctctttggcaaatggatgtcacacatgttccctcgtttgggagactagcttatgtacatgtatgtgtaaatacattttctcactttgtttgggctacatgctaaacaggggaatcttctgcctgtattaaatggcatcttctgcaatgcttcacagtcatgggcattccagcttcagttaaaacagacaatgctccaggctatactagccaagctctagctatatttttctctatatggaatattaaacacattactggcatcccatataattcacaaggacaagccattgtggaaagaatgaatcactccctaaaacaacaattacaaaagcagaagaggaggatcaatgattataggaatggtgattataggactctgcacatacaactaaatctagcattattaactttaaattttttgagcctgcctaaaggccggatgctaccagcagctgaacagcatctacagaaaccagcttcaaagacagaagcagaacaactggttttgtggagagatccaataacaaaaagttgggaaataggtaaaataataacatggggtagaggttatgcttgtgtttctccaggccaaaaccagcggccaatttggatatcatcaagacacctgaaacttcatcatgagccagatgctgaggaagagattttgggaggaacccaaggacctcccacttgcagccatgttgagactgacaataagtccacctttcctgcttgtagtgggtcatttaaaacttgatctccctaatcatcatgggacttgtcaagaatgtagattgttttcttgtgtgaattcttccttgtataatactgatcattctattttagcggtaagaacccaagaaggagtatggatacctgtaaagctttctggtccttgggaagcctctccttctgtgcatattattactgaaattcttcaaaagattctgagatgctctcagtgtttcattgctactttaattttaatcattatgggattgattgctgtcacagctactgccgcggcagctggagttgctttgcatttcacagtacaaacagcagactatgtaaataattggcagaaaaattctactttgctgtggaattcccaaactaatatagaccagaaactagctaatcaaatcaattatctccaacaatctgtaatgtggctaggagattgagtagttagtctagaatatagaatgcagttacaatgtgattggaatacttctgatttttgcattactcctcatctgtataatgaaagacagcatgagtgggaaagagttaagaaacatttgaaaggtcatactggaaatttactttagatattatgcaactgaaggaacaaatatttcaatcttctctggcacatctgacactaatgccaggaactgaagtgcttgaaggcgcttcagatggattagcagctattaacccattaaaatggatcaagacacttggaggctctgcaatttgaatgatgactgtgcttttaattggtgttgtttgtctttgtatatcaaattgaaatacaaatgaaattggtcatttgtacatctgcaaatgtggatcgcgaatcctgcgagaagtagcctactgtgacaaagctgcctatgcctttatcactttgcaaaaacagaaaggtgggacacgttggtagcaatccctaaccctgtcataaacagaccttaaagaaactggccataaacaggatttctgcagcaatgggacatgctcatgatggctgtcatgcacactgctaaaagttgttggtttactagagcagggcaaggaacacctggccccgcccggagcaaaaaactgctcaaaccacaaacgatagcaggaaaggcctgtggcttgacagcatgtttttgctacagataatcagccagagcctgtttctctgctcctcactgagattgctttgtttcccataaagaatgcttttagctaatctacaatctatagaagcaatgcttatcactggctttctgtcaataaatgtgtgggtcaagctctgtttgtggctctcagctctgaaggctgtcagccccctaatccccactttatactgtattcctgtgtctttgtcttaattcctctagtgccgcttcgttaggtctccatgactgagctggtcttggcaccatgttgctcagactagtcttgaactcctgcaatcctcccacaaagtgctgggattacaggcgtgagccactgcacctggccacaatcttccattttaacttgtcaaatttattagcataaacttgtttaaatattcctttattatccttgcatgtctgtagtacttgtagtgaaagaattccctttcatttctgaaactggtcatttgtgttttttctgaatcagactagctagaagtttatcaattttattgatcacacttttttcctattttattgatttccattctttattatttacttcaggtttaatttgctctgcttttcctagcttttcttttcttttctttttttgagacagaatctcattctgtattccaggttggagtgcagtggcatggtcttggcttactgcaacctccgcctcccagttcaagcaattcttctgcctcagcctcctgagtagctgggactacaggcgcccaccaccacacctggctaatttttgtatttttagtagagacaggtttcatcatgttgggcaggctggtctagaactcctgacttcaagtgattcgtccaccttggcctcccaaatttctgggattacaggtgtgagccaccatgcctggtcaatgtttttttagcttttcaaggtggaaatctacataactgatttaagacatttcctctttactaacataagcacttaacattatcagcttcattgtatgcactgctttaactgcatcccgtaaattttcatatgttctgtttccattgtcattctgctcaaaatgttttctgatttcctttgctgtttttcgttaattcttaggttaattcccaaatattaggggattttccagataactttttgctagaatttggttttgttatttaatgtcatctgtgtggtctaagaatatgctctgcataaattcaagtttttaaaacttactgacatttattttttggcccagcatatagtttaattttggggaatgttatgtgtgcatttgaaaaaaatgtgttttctctcttgttgagtgttctgtaaatgacaataaggtcgaattagattgatggtgttgttcaagtcttttatgtcttaaccaattttctatatacttgttataccaattactgagagagaagtagtaaaatctccaaccataattgtgtatttcttcatttttccttttagttttttccatttttcttcatatactttgaggttctattacttggacatacatatttgggactgttatatcttcatgatgatttgaccccacttatgaaatgttcctctttttccctgttaatattcactgttctgaacactgtttcctgatattactatagccactccatcatttgttagattagtatttgcatgttatatgtttctttaaatcatttaaattttaatcttcttgaactgtaaacactgtcttttggttagagtgtttagagtccatttacataatgtaattattgatgtggtttctttaaatcccacatcttactatttgttttctatttgttccagctgttcattgtcctctcccctttaactgccttcttttgagttatttgagtattttttgttatctcattttatctccactccatatattggttagatctctgtgatggataatgttaaatgctgctcaggttcctcttcaagaagtcattattgtttcccctgctgggagacctgttgacagatagctttctgctgacagacccttcagggattgccacgattgcagagagctaccttgctcaaggtcattcgccttcccaaggtggctaacatccagtgctgaatgcaagaatattaaggtctgaccatctcaatccaactcagcacaattctgaagagtcattctagttctgtagcttcatgtgggcttggccaaggctattattggactagcataacaacctgacttctcatcctgcccacccctgcttgtgtcaccttccttctacaggtatttatcccaagagcactccttaataaacatccttcacactgaactccatctctgctcatgggaatcaacctgcaacagcttctttgttttagtttttagtggttgctgtaggcattgccaatatgcatattttaagctattacagttgtgttagtttgctagggctgccataacaaaatactacagactgggtggcttaaacaacagacatttatttcctcttagttctggaggccagaagtccaagatcaaggtgttcacagatgtggcttctcctgaggcctctctcttttttgaattttttattattatactttaagttctagggtaaatgtgcacaacgtgcaggtttgttacataagtatatatgtatttggtttgctgcacccattaactcgtcatttacattgggtatttctcctaatgctatccctcccccaggcccccaccccatgacaggccctggtgtgtgatgttcccctccctgtgtccaagtgttcccattgttcaattcccacctatgagtgagaacatgtggtgtttggttttctgtccttgagatagtttgctcagaatgatggtttccagcttcatccatgtccctgcaaaggacatgaactcatccttttttatggctgcatagtatttcatggtgtatatgtgccacattttcttaatccagtctatcattgatggacatttggttggttccaagtctttgctattgtgaatagtgccacagtaaacatatgtgttcgtgtgtctttatagtagcatgatttataatccttcgggtatatacccagtaataggatcactgggtcaaacagtattcctagctctagatctttgaggaatcaccacactgtcttccacaatggctgaactaatttacactcccaccaacaatgtaaaagcattcctatttctctacatcctctccagcatctgttgtttcctgactttttaatgattgccattctaactggcgtgagacagtatctcactgtggtttgatttgcatttatctgatgaccagtgatgatgagcattttttcatgggtctgttggctgcataaatgtctttttttgagaagtgtctgttcatatcctttgcccactttttgatggggttgtttgattttttcttgtaaatttgtttaagttctttgtagattctcgatattagccctttgtcagatgagtagattgcaaaaattttctcccattctgtaggttgcctttcactctgttggtagtttcttttgctgtgcagaagctctttagtttaattagatcccaaatgtctattttggcttttgttgccattgcttttggtgttttagtcatgaagtccttgcccatggctatgtcctgaatggtattgcccaggttttattctagggtttttatggttttaggtctaacgtttaagtctttaatccatcttgaattaatttttgtatgaggtgtaaagaagggatccagtttcagctttctacacatggctagccagttttcccagcaccatttattaaatagggaatcctttccccatttcttgtttttctcaggtttgtcaaagatcagatagttgtagatatgtggtgctatttctgaggcctctgttctgttccattgatctatatatctgttttggtaccagtaccatcctgttttggctactgtagccttgtagtatagtttgaagtcaggtagcatgatgcctccagctttgttctttttgcttaggattgtcttggcaatgtgggctcctttttggttccatatgaactttaaagtagttttttccaattctgtgaagaaagtcattggtagcttgatggggatggcattgaatctataaattaccttgggcagtatggccattttccagtattgattcttcctatccacgagcatggaatgttcttccatttgtttgtatcctcttttatttcattgagcagtggtttgtagttctccttgaagaggtccttcacgtcccttggaagttggattcctaggtatttctctttgtagcaattgtgaatgggagttcactcatgatttggctctctgtttgtctgttcttggtgtataggaatgcttgtgatttttgcacattgattttgtatcctgacactttgctgaagttgcttatcagcttaaggagatttggggctgagacgatggggttttctaaacatacgatcatgtcgcctgcaaagagggacaatttgacttcctcttttcctaattgaataccttctatttctttctcttgcctgattgccctggccagaactggcaacactttgttgaataggagtggtgagagagggcatccctgtcttgtgccagttttcaaagggtatgcttccagtttttgcacattcagtatgatattggctgtgggtttgtcataaagaaaagaggtttaattgactcatgtttcccctaaggctggggaggccttaggaaacttagaatcatgacagaaggcacctcttcactgggcagcaggagacagaatcagcactgagtgaaggggaagcctcctataataccatcagacctcatgagaactcactatcattagaacagcatggggaaactgcccccatgatttaattatctccacctggtcttgcccttgacacatgaggattgttataattcaagattgaaaaaaaagatagttacttcctagacacaatggaggtacaggcattgggtaaatataactgttccaaaggggagacattggccaaaacaaaggggccacagtccccatgcaagatttgggtggcgtcacagccaagccacatcattccaccctggcacctcccaaatctctgtcctcacatttcaaaacacaatcattctcttccagcagtccccgaaagtctgaacttaatttcagcattaacccagaagtccaggtccaaagtctcatctgagacaaggcaagtcccttccacctagcctgtaaaatcaaaagaaagatagttacttctggccagatacagtggctcacgccggtaatcccaagacttttggaggccaaggtgtgtggatctcgaggtcaggagattgagaccatcctggtcaacatggtgaaatcccatctctactaaaaatacaaaaattagctgggcatggcggtgtgtgcctgtaatcccagctactcgggaggctgaggcaggagaatcgcttgaacccaggaggcagagattgcagtgagctgagattgcgaccctgcactcctgcctggtgacagagctagactccgtcaaaaaaaaaatttacttcctagatacaatagaggtacaggcattgggtaaatatacctgttctaaaggggagacattggccaaaacaaaggggctacaggcctcatgcaagtccgaaatccaacaaggcagcaattaaatcttaaagctctgaaataatctcctttgactctatttctcacatccaggtcatgctgatgcaagaggtgggcccccatggctttggccagctccacctctgtggctttgctgggcacagccccactcttggctttcacgggctggtgttgagtgtctgcattttttccaggcacacggtgcaagctgtcagtgaatctaccactctggggtctggaggatggtggccctcttctcacagctccagtagacagtgccccagtgggaactctctgtgggggttccaaccccacgtttcccttctgtgctgccctagcagagtttcatccatgagggctccgtcccccagcaaacttctgcctggacatccatgcatttcatctgaaatctaggcgtagattcccaaacctcaattctttacttctctgcacctgcaggcccaacaccatgtggaagctgccaaggctcagggcttgcaccctctgaagccacagcccaagctgtaccatggctgaagcagctgggatgtaaggcaccaagtgtctaggctgcacacaacaaagagggcctgggcctggcccacagaaccattttttcctcctaggcctccaggcctgtgatggggagggctgccctgaagttctctgacatgccctggaaacattttccccattgtcttggtgattaacatttggctcctcattacttatgtaaatttctgcagcaggcttgaatttctcctcagaaaattggtttttctttcctattgcatcatcaggctgcaaattttccaaacttttatgctctgcttcctttgaacgctttgtcaattagaaatttcttccaccagataccttaaattatctctctcaagttcaaagttccacagatctctagggcaagggcaaaatgctgccagtctctttgctaaagcatagcaagagtcaactttattccaattcccaaaaagttcttcatctccatctgaaacaacctcagcctggactccattgtccatatcactgtcagcattttggtcaaagccattcaaaaagtctctaggaagttccaaactttcccacattttcgtgtctgcaaaccattctgacctctgcctcttacccagttccaaagttgcttccacatttttaagtatccttatagcagcacccccttcctggtaccaatttaccctattaggctgttctcaagctcctatgaataaatacccgagactaggtaatttataaagaaaagaagtttaattgactcacagttccacatggctggagaggcctcaggaaacttacaatcatgatagaagacacctctttacagggcagcaggagagagcctgagcactgagtgaaggtggggaagccccttataaaaacatcagatcttgtgagaactcactcactatcatgagaacagcatggggaaaaccatctccatgtttcaataatctccacctggtcctgcctttgacatgtggggattattacaattcaagatgagatttgggtggggacacagccaaaccatatcaggtctctttcacagtacattatagtctgattttctaaagtccaagataatgattgattcctaaaaacagcaggagaaaagcatctattacctataaaggaaagcctatgagactaacagtggatttctcagcagaaaccttacaggtcagaagataattggatgatatattcaaagtgctggaagaaaaatgtcaacagccaaaaatattttattcaacaaagttacccttcataaatgaaggagaaatgtctttcccaaataagcaaatgctgagggaatttgttaccactagactggtcctacaagaaatgctcaagggagccctaaactcagaaacaaaaggacaacatttaccatcatgaaaacacatgaaacaaaattcactggtaaagcaatcacacaaaggaggaagagaaagagctcaaatagtaccactacagaaatccaccaagccacaatgacaataagagaaaaagaaacaaagaatatgcataacaaccaggaaacaacaatatgataggaacaaagcctcatatatcaataataaccttgaatgaaaatggtttaaattcttcactaaaaagatattcactgattggagctaggtgtggtggctcatgcgtataatcccaacactttgggaggcagaggcaggtggattgcttgaggccaggagttcaagaccagcctggctaacatagcaaaaccccatcgccatatcatagcgaaacaaaaattagctacgtgtggtggtacgtgcctgtaatcccagctacttgggtggctgaggctgagaatcacttgaacccaggaggcagagattgcagtgagccgagatcacaccacttcactccagcctgggtgacagagtaagacagactgatcaaatagatttttttaaaaagatgatcaaactgtatgttgcttacaggaaattcaccttatcagtaaaggcacacatagactgaaagtaaagaaatggaaaaagatattccatacaaacagaaaccaaaagtgagcaggagtatctatgcttattatactacataaaacagactttaagtcaagaccagtaacacacacacacacacacacaaagtcattttataatgataaaggaatcaatctagcaagaggatataacagttataaacatatatgcacccaacattggagcacccatattcataaagcaaatattattagatctaaatagagagatagcctgcaatacaatcatagtgggggacttcaacaccccactttcagcattagacagatcatctagacagaaaatcaacaaataaacattggacttaagctggacttcagaccaaatgaaccttacagtgatttacagaactttctatccaacgactgcagaatatagattcttttcatcagcatacaacacattctccaggatagaccatatgttaggccacaaaacaagcctcaacaattttttagaaatcaaattcatatcaagtatctcctctgaccacaatggaataaaactagaaatcaataccaagaggaactttggaaactatagaaatatatggaaattaaacaacatgctcctgaacgacaattgagtcaatgaagaaattgagatggaaataaaaaaaaattctttaaggaaatgaaatataccaaaatctgtgggatacagcaaaagtagtgcaaaaagggaagttatagcagtaactgcctacatcaaaaaatagaaagatcacaagttaacaagctaacaatgtacctcaaaggactgaaaaagtaagaacaaaccaaactccaaattagcagaaaaaaggaataaagatcagagcagaactaaatgaaaaacagactaagaaaatacaaaggataaacaaaacaaaaagtttgctcttcaaacagataaacaacatggataaatcactagccagactaaccaagaaaaaaagagagaagacccaaataaaatcagaaatgaaaaaggagacattacaactggtaacacgaaaatataagagatcatcagggactactatgaacaattatacatagacaaactggaaaaaacagaagaaatggaaaaatttctggacacatacaacctaccaagtttgaaccaagaagaaatagaaaacgcaaacagaccaataacaagtaacaagattgaaacagtaataaaaatcttcttaacaaagaaaaaccctttactggatagagttacagctgaattctaccaaatgtaaaagaactaataccaaccctcctaaaaactattctgaaaaatcaaagaagagagaattctccctaactcattctatgaggccagcatcaccctgataccaaaaccagaaaaggccacagcaaaaaagaaaactacagggcagtatatctgatgaacattaatacaacattcctcaacaaaatactagcaaaccaaatccaacagcacatcaaaaagataacacacctgggctgggtgtggtggctcacacctgtaatcccagcactttgggaggccaaggcaggcagatcacctgaggtcaggagttcaagaccagcctggtcaacatggtgaaaacccatctctactaaaaatacaaaaattagccaggtgtgatggtgggcgcctgtaatcccagctacttgggaggctgaggcagaagaattgcatgaaatcaggagatggaggttgcagtgagctgagatcacaccactgcactccagcctgggcgacagagtgagactccttctaaaaataataataataataataataataataataataataataacaaaaaccaaaaaaaaccccaccataatcaagtgggatttataaaaggggtgcaaggatggttcaatatatgtaaatcagtaaacatgatacaccatatcaacagaatgaaggacaaaaactgtatgatgaattcaatagaagtagaaaaagcatttgataaaattcaacatcccttcatgatagtctcaagaaattaggcaatgaaggaacatacctcaaattaacaaagggcatatacaacaaatccacagctaacatcatactgcatggagaaaagtggaaagcctttcctctaagaactggaacaagacaagtcacttttaccactcctattcaacatagtactggaagtcctagccagagcaatcaggcaagagaaagaaagaaaaggcatccatattgcaaaagagaaactcaaattttgctgtttgttgatgatatgatatatgatcctatatccagaaaaacctaaagactctactaaaaaactcttagatttgatgaatgaattcactaaagttacaggatataaaaaaattgatgtacaaaaaccagtcgtgttgctatacatgaataatgatctagctgagaaataaatcaagaaggcaatcccagccaggtgtagtggctcatgcctgtaatcccagcactttaggaggctttggcagtaggatcacttaaggccaggagtccaagaccagcctgggcaacatagtgagaccctgtataaaaataaaaataggccgggtgcagtggctcatgcctgtaatcctagcactttcggaggctaaggcaggtggatcacgaggtcaggagatagagaccaccctggccaacatggtgaaaccccatctctactaaaaatacaaaaattagccgggtgtggtggtgtgcacctgtagtcccagctactcaggaggctgaggcaggagaattgcttgaacccaggaggcagaggttgcagtgagccgagatccagcccagtgacagagcaagattctgtctcaaaaaaataaaaaataaaatataacattagccaggtgtggtggcatgcacctgtagtcccagctactcagaggctgaggcagaaggattgcttgaacacaggaattcaaggctacagtgagttgattgcaccactccactttggcctaggtgacagagcaagaccctgtctccattttttttttaaaggcaatcccatttacaaaagctacaaaaaataaaataaaatacccaggaacacatttaaccaaggaagtgaaagacctgtacatggaaaattacaagaaaccaatgaaagaaattgaagaagacacaaaggaaaaacatcccatgctcttgaaacagaagaattaatattactgaaattaccatattgcccaaagcaatctacaggttcaacataatatctatcaaaatactaacatcattgttcacagaattagaaaaaacaatcttaaaattcataaggaaccaaaaagagcctgaatagccatagtgtttccggagttggttccttcctgtgggttcttggtcttgctgactttaagaatgaagctgcggacctttgtggtgagtgttacagctcataaagctggcatggacccaaagagtgagcagcagcaagatttattgtgaagagcaaaagaacaaagcttccacagcgtggaaggaaacccgagtgggttgctgctgctggctggggtggccagcttttattcccttatttgtccctgcccctgtcctgctgattggtccattttacagagcactgattggtccattttacagtgtgctgattggtccaatttacagagcactgattggtccattttacaaacctctagctagccacagagagctgattggtgcgtttttacagagtgctggttggtgcattttacaaacctctaggtagccacagagcactgattgctgcattttacaatcctagctacagagtgctgattggtacattttacaatcctcttgtaagacagaaaatttcttcaagtccccacccaacccagaagtccaactggcttcacctctcaatctcccctctaaacaggacaccccagctgctgttggaaattgggcgatgaccattctagctacttcctgctggataggggcgaagaagggccctgcagtggtagtgtcctccagaggggaactctaggccagccaaagggtcagtgggttggtccaggggtcctcagtagaagttgttaattgagctcatttgggattccatttgtaaggccatctgtagcttgacagcctcgatcctacaggaaccaaatttgacaaggatgttaaaaatacaaggcccaaaggcaagtaatagcaagatggctgcacaggacctagaaaggggagaagccacgtcacccaactccagaggttggtataagagtttgaaaggcggccagacgcagtggctcacgcctgtaatcccagcactttgggaggccgaggcaggcagatcacaaggtcaggagatcgagaccaacctggctaacatggtgaaaccctgtctctactaaaaatacaaaaaattagccaggcacagtggtgggcacctgtagtcccagctactcgggaggctgaggcaggagaatggtgtgaacccaggaggtggagcttgcagtgagccgagatagcgccactgcactctggcctgggtgaaacagtgagactccgtctcaaaaaaaaaaaaaaagtttgaaaggcattgtctgatttgagaaaccttttcctgtaaacgctgggcggcatctcgtactatcgctgaccggttagtgtaaaagcaacagtcttcccctaagaaggtgcagagtcctcctttctcagcagtgaggaggtctaggcctcagaggttttggagagtcactgctaccaaagagtctatctgggattgtagagtaaggatagattttgttatttcttgtaaactgtctgagaaatcctttgagagtgtgtggtagtaggatagtaaagtagataaactggcgattctggttcctgtagcagtggccattcctaaccctataagtaaggttattagttgtatggccctgcactgacagacttcagctttgaggggcactaatatggtctgatttcctcaagattagaagttaggataatacatgttacactgttaacttttagcaagctttacttttgtcaaaaaccttgtaagtttgggatttcaattattctttgctattaataagacctcgttcagtccatattaacttagaattggtatagatggctcctttctgatgctgtaagtactttaaggtttggctgagtgcaaacagctcacacgtttgagcagaccaattattaagcaactttcctaactctgcttctacaagagtttccttatcacttactgaatacccattgtgtctttttcccttaatagctttggaggaaccatctatcatcctgtcccaaagggggttcctcctaggtctgttcagatctttgtgtggtaattaattaagctttagatctcctgtcaggaaacctgctgggttaaggatttttgataagaaggctatagattgtcagtggcctcagtgcttttgggctacgctcttggttacactgacaacaaggtggtattggagtgttacagggttacagagaagaccttcaattatcaattataggttttaaatttaccctggtttttaaaggaatagggtacacacttttttctttactacttctatctctctctctttctctctctttccttctctgtctctttctctctgactttctgtctttgtctcttcctctctctctctctcactccctttttgtctctctgtctcttcccctccctctttccttctctctttgactttgtctttcccctctctctttccttctctgactttccgtctttccccctctctctctctttcctctttctttctctctttgactttctgctggtctttccctgcctctaccagccgcttatgctgctattctcccctatccttcctcatggctttggcagtgtaagactgccacctccttgggtttttgcactgtaataacgccatgatttccttgtgatatttaatgggggttcccccagaggttaggaactccctttctttccatattgcagcatgggcatgtaggattagataagcatacttgctatctatatacacatttattctttttccctttcccagttctaaggctcacgtaagtgccactagttctactaactgatcgctggtccctgggggaagaggcttactttcaagtactgttacatcactaactatggcataacctgccctttgtatcttattagccacaaatgaacttccagcagtatgtaagttaaggtcaggattagctaaggggacttctaagagatcctctcaggcaacataaatctggactataatttgttggcagtcatgcttgattggttctccatcctctgggagaaaagtagcagggttgagggctgcacacatgcatatttgaagcaccagtccctcaaggagtagctcctggtatctaagccggtggttgtctgatagccataaacttcctgtggcacctagtatgccatttacaccatgagtagtccagacagtgagattcttttcttgtattattttgatagcctctgatactaagatggccattgccgcaactacccataaacagtgaggccagcttcttgctactacatcaatttccttacttaggtatgccactagttgtagggttgtcccacgagtctgagtaaggactccaagagctaatcctgctctctctgtgatatataaagagaggttttgtcctgtgggaaggcttaaggctggagcttgtactagggcctgctttaaggttttgaaggctgtttctgcttctggttcccattctactagatgagtatttgccctctgggtctccgtgattagagtatagagtggtctggccatctcgctctatctggggatccatagtcagcaaaacccagtgattccaaggaacccctgcaattgttttaatgtcttagggcaaggacaagccagtataggctgtattcattccttgctgagggccctggttcctctggctaagactaggcctagctatttgacttgttgtaggcagagttgggccttcgatttaaatgctttgtacccttgattagctagaaagtttaagagacctagagtagcctgctggcatgaggcttctgaactggtagccaaaagtaaatcatccacatgctaaaggaccagagtgcctggacttgagaagtggcctagaacttgggccagtgcctgaccaaacagatgagggctatccctaaacccttggggcaagaccgtccacataagttgggatgtgtggtctgtgggatcctcaaaggcaaagagaaactgggagtcacagtgcaggggaatacagaaggcatccttgaggtccagaaccatgaaccattctgcttcctctggtatttgagagagcaggatataggggttgggtacaactggatatagaggaattactgccttattaatgcgtctaagatcttgcagtagtctccactgactgttctgtttttctactcctagaattggggtgttgcagggactgctgcattttttttttttttttttttttttactaagacttgagcttttaaatgtctaacaatatcctgtaatcctttatgaacttcaggccttaagggatattgcgtttgatagggaaaagtggtggggtcttttagcctgatttggattgggcgggcatttttgcccttctgcattgtccttccaatgcccagacttcagtgttgattccctccttaagcaggggacaacaaaagggtaacttgttccccatattcacgtagataatagctccagctttggctaatatgtccctccctaataaggatatgggactttcaggcataacaagaaaggcatgtgaaaagagcaaagtctcccaattacaattgaggaggtgggagaaatacctggttacaggctgtcccaggattcctcagatggtaatggactttgaggacagccgaccagggcaggagattaacactgagagggccgcaccagtatccaagaggaagtcaatttcctgtccctcaatagttaaatgtacctggggctcagtgagggtgatgacataagccggtgcttgttccaggcaccctcagtcctgttgttggatcggctggttgggggattctggcctagagaacatttgtcctctggggcagtgtgccttccagtgattgcctcggcatagtggacatgggcgagggggaagcttgtttctcactggacaatcttttttaaagtgtccttgcaaaccacactgataacaagccctaccagctgattggcctgctctattttctgtcctctctgaaccaccagggtttgtttgtctgagggccatgactaaggctgtgccctttctctgatttcactttttcttctcagcctgttcctcttggtcccttttatagaacactgaggttgccatgtttaataatgcctccagattttgttcagggcctagggctttcttttggagctttctcctgatatctgtgactgattgggaaataaacttatcttttaggataaattgaccctcgagggagtcaggtgacaggggagtgtattttcttaaggcctcctgtagatgctcaaggaagacagaaggattttcttcctttccttgagttatggtggacatcattgaataattcatgggctttttcctaattctccttagtccttctagaacacaggtcaacagatgtttgcgacaccagtccccatgatctgagtctaggtcccagtggggatccatactggggatggcttgctgaccggtagggaatttgtccctttcttcagctgtcattctatcatttacttgactaaaataccaggtatctccaaactctcgggttgcagctaaagccacattcttttcattaaaggccagggtttgatctcatagcatgacatctctccaagtggggtcaaaggtttgccctagaccctgtaggacatctatatacctatcaagatcatctgaaaacttccccaggtctaccttaatctgctttaaatcagagagggagaaggggacatgtacctggattgggccaaattcccctccccctacagtttgaatgggacataactgatagcctgggggtttttgtggtcctttggagatttctttgcttgtttccttctgggcagagaagattagaggaggcttatcattaataggaaggggagctatagggaggctaggataatgggggtaagctgagaggtcctcctgtggaatgaaaattgcaagctttgcatagttgtggattctccttcaatgaaaagaaagcttggacataaggtatttcactccatttgccttccctcttacagaaaaggtcaagctgcaggatagtattgtaatttacactcccctcaggtggccatttttccccatcagagagagaatattggggccaggccatagtgcagaaaaaaatgagtcacctctttatcagggtttgcgggtcaaattggtcccagtggcttaggatgcatttcaaggatgagcctgttgatgcctgagtgtttcccatctgaaagaaaaaaccgcccatggttttggtttgtttctgcccatgcccccccacccctggcctgcccaagaatctgcaatggtccctggaccctgctgatcagaatagttgtactcactgatgcagtagcagaaacactagttttcctcctaaaccacaaggaggactgaggaaggtcggatttagtggcccttaccgacacattcttgaaaacctgcacccttgccttccctcttagaccgcaaagaggaccaagaaaaatcaggtttagtggcccttaacaacacattcttgaaaacctattagagtcctaagcattttctcctgttagtattgggaccttacccctttcctataaagatgatattccccaaaaatggagtggagggccataccctgagggagggaagagatctccagggttggaagagtaatgccttttgtccttacttctcatcatatggataggaaggatataatttctgaagctccccatatagcctttgttaggcctgcttgtctgaggagggatcctaaaaggatagttgaactcccccacgcgacggggctttgggcaaaaattatgtctaattggtgagcctgggtgcctaaagaagggaacagagtcatgaaatttatactagacatcattcttataggagaaactagaaaagcaccagaaacagggagtgctttctaaaagcgggactagtctcggagaagagaggcaggaggaagtttgtctgacaggcattaggacccaggaggcaagggtcaggatagataggatagatgggcaagtgttgcttgggcaatgtaactttgagagttccactcatggctacatggtcaaccaacattttgttgggaccttggagctgaatggctttcctttctgtcaacccttgggtcagcccagatgtacaggaaaagtggaagctggttccaggtaaaccaacgctcccaactccgaagagtcagggtttgttagagagccctttcccagaaagcctgacacccatgtctttagtccggtggccacgctagtcacttttaactggctgacaggtgcctggtgtttagtccctgaatcctaaggaaaaataggacagaatagctagcgaaaggggtccaatggtactcactgcttgacgatagtcccttcttggtcaccaagaagtgtctggaattggttccttctggtggattcttggtcttgctgacctcaagaatgaagtcgtggacctttgtggtgagtgttacagctcttaaaggtgccacggacccaaagattgagcagcagcaagatttattgtgaagagtgaaagaacaaagcttccacagcatggaaggagacccaagtgggttgctgctgctggctggggtggccagcttttattcccatattggtccccacctatgtcctgttgattggtccattttacagtgtgctgattgccagattagagtgctgattggtccattttacaaacgtctagctagccacagagagctgattggtgcatttttacagagtgctgattggcacattttacagacttctaggtaaccacagaatgctgattggtgcattttaaaatcctagctatagagcactgattggtacattttacaatcctcttgtaagacagaaaagttctccaagtccccaccccatccagagtccagctggtttcacctctcagtagcaaccctgagtgaaaagaacaaagctggaggcatcacattaccttacttcaaaatatattacagggatgtattaacaaaaatagcatggtactggtataaaaatagacacatagaccaatggaacagaatagagaacccagaaataaagccacatatttatagccaacgaatctttaacaaagctgacaagaacttatattggggaatggaaaccctcttcaataaatagtgctgggaaaattgggtagtcacatgcagaagaatgaaaccagacccctatctctcaccatatacaaaaaccaaatcaaaatggactaaagacttaaattcaaaatttgaaactatgaaaataccagaagaaaacctagggaaaactctcctggacattggtctaggcaaagaatttatgactaagacctcaaaagcacaggccataaacacaaaaatagacaaatgggactctattaaactaaaaggcttctgcaaagcaaaagaaacaatcaacagagtaaagaaacaacctgttgaatgggagaaaatatttgctaagtattaatccaacaggggactaatatccagaatatacaaggaactcaaacaactgaacaggaacaaaatcccaaataatcccattaaaaagtagacaaaggacatgcatagacattttgaaaagaagacatataaatggataacagcatatgaaaaaatgctcaatgtcacttatcatcagagaaatacaaatcaaagccaccatataattatcttatcccagctggaatggctactattataaagacaaaaaataacaatgttgacgaggatgcagagaaaatggaactcttttttattttatttttggagacaaggtctcactctgttgcccaggttggagtgcagtgtcacgatcatggctcagtggagccttcacctcctgggctcaagtgatcctcccacttcagcctcctgaagagccgagaccacaggcatgcaccaccacatctggctaattttttttttttttttttttttttgtagatacaagcagggtctccctatgttggtccaggatggtctcaaactcctgaactccagcaatcctccctcctcggcctcccataatgctgggattacaggcatgtgtcaccacatctggccgaaaagggaactcttatacactgttggtgggaatgtaaactagcacagttattatggaaaacaaccgtatagagagttctctaaaaactaaaaacagaattactatgtgatcctgcaatcccagtattggatagctacccaaaggaaaaggaatcaatatattaaaggaatacctccattcttgtttattattgcactattcttaaaagagaagatatagaatcaacctaagcattcatcaacggatgaacagataaagaaaatgtagtatatatacacaatgaaatactattcggccattaaaaagaatgaaattggccaggcatggtggctcatgactgtaatcctaacacttggagaaactgaggaggaaggattgcttgagcccaagagtttgagaccagcctgggcaacatagtgagaccttgtctcataaattttaattaaaaaaaaaagaaaccctgtcattggcagcatcgtggatggatctggatatatcttaagtgaactaagccaggcacaacaagacaaatatatattctcacttatatgtggaaactaaaatattttattttatggcagtagagagatagataacagagactgggaggggtgagtagggagctggggtgggtgggtgaagagaactgggttaaagggtacaaacatacagatagaataaactcaatgtctgatagctgagtagggtgactatatttaagaataatgtattgatcttgggtgatggatacctaaatgccattacttgaacaatacacattatatacatgcaacaaaatttctcatgtcctccatgaatttgtacaaaaatacctgtaaaaatcaaattaaactaaaatccttgactgataatcccattatctctgtcacttctgtatctgttcctattgaatgatttttctgcttcttttgggtcacattttcctgcttcttcctatgcttagtaattcttttattagatgtgggcatttaaaatatttttttactgagtgtcagattgatagaatttctttaaaaagtgatggttcctctggtgggtagttaaattaacttatagatcaagttgatcatgtcaaggcttgttcctttagcttagtattgaggtttacaatagcctttattatctagggctggtttagctccactatggagtgactctctgggtctctactgaatgttctgagttttccatgaagactccaattttgctgggtggagctaaacatttccccatcctgtgtgaattcttggaggttctcaggtatgtcatataccctgttgtatcctgctccctcttgcgcagaggctcgcccacacagcttttgttgctattagtagtttgtctctatttgcttgtattttgatgttttgagggaaatcctgtcacctggtttttcagtgagtgcacttggatggtctggttttttccatacagttgctctgtgtttttcatttttatttatttatttattttaattaattaattattgctattttgtgagacattcaagtcttgctctgttgccaggctggagtgcagtggcatgattttggctcactgcaacctccacctcctgggttcaagtgattctcccacctcagcctactgagtagctgggactacaggtatgtgccaccatgcccagctaatttttgtatttttagtagagacagggtttcaccgtgttggccagaatggtctcgatctcttgacctcgtgatccacctgccttggcctcccaaagtgctcagattacaggcgtgagccaccatgcccagccttatttttatttatttttaacaaacgggggtctcactatgttgtccaggctagtcttgaactcctgggctcaagtgatgctcctgcctcagcctcctgatgtgctgggattacaggcataagccatcacacccagcttactctgtgttttcatgtgaagattttgaaagattcaaaaacaatgcagccaacaacctaaccatcatcttcccagtctggtagaagttttaagggccagcatttaccatgctctctttcccttgtctctccaatagtagaagcatgtatcaaaaggtagccctcttagtctgtgtccctgagttattacaatgagtagagcttgtttgttgacctccaatggatatgtatcacgagaaagatataaattttgttattttaagccattaaggttttgggatttttccattagcacagcataatctaatctctcttgagagatagtgttagctttctacccaagccaattcatttttttgacctcaagtaaccaccattaagttaagagaaaggggcggggaaagtacgaggtctaggaagaaaataaataaggcaaagaaataaagcactttgagaactgtgtctaggaaataacagatagcttattaagtcttgggggaactgtattaccaaagaaagtatacactgcccacccctcccccaacaattatacactgtgaatggtactctcataaaattgtttaatttcgtattgctatgcctaaattacccactacagtgaatgtctaaccagggcctctcagaaactgagagagggtgaggccacttatattttctcaaatgaagaaattcccaaataacattataaaaactgtggttactttcaaagtttatcttgctaaatgaatgtatttaatcccttaatagaattcattataattatatagatgccaagtcttattacaatgctatagttttccatcttcttccatagcttgatactaaagaatgtcatgttcaactgattcttctcaattccttggtttctggtcttgattgttgaagggtggggaagccagggaatagtggtcctaacacactgaatgccttaatggcagaattcactgccataaattctacagcagacatttggggtttcagattttttttgcctttcagtttttggtcacccgatgtctgataccaaatgtgatatttagcaatcttgtagtcgttcaaaagaacagaaaacccaaatagaactcgtttttcaaatatccattatcacctttctcaaccagcctagtatttgcttgatgagctcatgatcaaaatgatggcagggaatcactttggttactatatggaagatttatttaaggcaagaatgaattcagaggaccagttaagctcccttctggttcactgctattgcaacagtccagatataagacaatgttgcagtagtgtacatggaaaaaagtagtcggatggtggatacacttttgaggctattttgctgatggactgtatatgggaggaatcaagtattgttaccgaaacaccaggggtttggtctaggtcctgctgctcggtgcacagaaagccaatcactgagatgacaagtattgccaaggaagaaggctttaatcaggtgctgcagccaaggagatgggagtgcagtctcaaatccatctccttgactgaccaaaaccaagggtttatatagcaggaaagaaatgtaacaatatgtaagaaaacaggaacatgggaggggcaaggaagcaatcatggtgactgaggggcccagcatctagtgcagtgatctggtttcagttcttttgatactttttatggcttcagttctttgatactttttgtgagaggcctgaaggtcctttcctgaggaaggaactcggataaaacaagtaagtttccagctttaactgcaaaagggtcaacttctataatcccagcactttgggaggctgaggcaggcaggtcacctgaagttgggagttcaagaccagcctggccaacatgatgaaaccctgtatctactaaaaatacaaaacttagctgggcatggtggcgtgcctgtaattccagctacttgggaggctgcggcaggagaatcacttgaactcaggaggtggaggtcgcagtgagccgagatcgtgccactgcactccagtgagggcaataagagccaaactctgtctcaaaaacaaaaacaaaaacaaaaacaaaaacaactgtctatgggactctttggctggtttcagtaggactcataaggttctgatttgagcaatggtgtagttgcttatgccattgattcagacagggaaaactggggaggagatttacggggaaaatgaggacttctgctttggctaggtcaaatttgagatgcctgataggctaccaactgcagttgtcaagtaagcagttggatataaatttggggttcccagacaggtcagagtggaagacacagatatttgggcagcttggaccactctgagtccttattatgatacctgacctggtatggagtagaagagaggaaccagccaatctaatttttggcacatggataaaagtcgatacctttcagtccatattggaatggagataacgatttatactccctagaaaagacacttaaactggatatggaattacttccgttatcacagtctatcactgtggcctcctgtgttattaccagataccttatacacagctagggtgtcccatacaacactgcttcttgcttggcacacagtcgcatagtattcaatcctgtgttaaatggcttagataataagtcacctgtagggattatagcaagcagggaccatcattttcacatagaatttcccaggactggaagggacttttaaagacccagaaatctttctgggcagtgcctccaaagtgtggcccctgaggtgttcctgctgctctggtgaccgggggtagttgaccctatttcaatgtcaatcagaacaatatacattcctttataaacttgttttttttttgagagagagtctcactctgtcacctaggatggagtgcagtggtgcaatctcagctcactgcaacctccgcctccctcctgtgttcaagcgattctcctgcctcagcctcctaccgagtagttggaattacaggtgtgtgtcaccatgcccagctaatttttgtattatttagtagagacaggtttttgccatgttggtcaggctggtctcgaactcctgacctcaagagcctcctgggcctctaaaagtgctggaattacaggtttgagccacctcgccctgcctatagtgaacatttacataatattttgtttgactaggtttctgccattaagaagatgcaaaaccctgagggagtgtacctcttcactttgcatatgggaaaactgaggctcagagaagtgaaatgactgagacctccaggtgccacctccctttcagctgctcctgccctgctccaagcaaggatgtgccaagtcaagagaagacagaggacaattaatgttatctgaggatctcggagcctcatccctgagctatgatggtctttccctccttagttgggagccccatcacgttcctccgaagctctagttgtgtgataaggagggtggaatctgagacagagaacgatggccctccaaggagggagttcggggtgaggaaaacagcaaaaccatgtgctagacaagatcttcaactgcagggctctggaggcaactgggaagttttgaaagtgcagattgaagctcagggccgctgtgggtggcgcaggaactgcagaagacaagataggattagggagggccagcaggttgccagaggcccttttccacctgctgggcttagaggggcgggactctgcccgctccctcacttggttgggtttaaatgaccactccccgccctagctgtgcctttgagtgtgtggcaagggattgcagacgggagactgcttgtcaattcagggaagtcagcctctttctgccacttaattcgcccatcagtagagatccgactttcccacggttcactgtcacccccattgcacaggtggggaatccaaggcacagaggcgtctgggccagagtcccgggactatccactcattccggggttgtagggcagcatgtgtcaggagcttgggctcgagcgtgcggggcactaattgcgagtgcagtggccacaggctcccgggcaaagtggtcaggagcccattcccgccacctccgtccgcgcgccccgccctgtcctccagcaagttggtgcacgcgcgtcctcccacagggcgcgggatgggggcggggcctccgtgttgttgtttctctggggccccgcccctcaggggggcgcggaccacgcggccggagggcccgcctcccctccccctccccgcccagcccgcccgcctctttgtatccaacatccgggtttccccgctggctcggctccgtggccgccgctcaggagccattttggactcggttcagctcccctcccccccacccctccccccgttcatggcccctccggactcggcccctgcgcccggggcccgggcccagccccgccgcgctatgcctgagtcgggcgcgccccggcccgtgccccgccgccgccccccggcccccgcgtcgccccggagcccgggccgcagcctgcgccgcccgcagcggccctgagcccggccccgccgaccggcccttggagcccgaacgctgctcggggacgaaggcgcaggaagcgcgcagggaacgagaccgaaggaaggagcgggaaggagagcgcagccgccgcctggccctgcgcgccccgggagcgccgtgcggccctgcccgcgggctccgggtgtgcgcggggcggcgccgcggaacatgacggcgccctgggtggccctcgccctcctctggggatcgctgtgcgccggtaagaactgggcgcggcgcggggacgccgagagggcgcgcggggctggcctctggcgccgcgcggtgtttaccaacaaagggcgggcccggggcctcgtcgccgcaccacctgtattcagccctcacctccgggggcgtgggctgggggcgcggtgggcgcccggctcgccgaacttgggggcacgatcttgtctgtgcagtcatctgcgggattctggttcctagaggcgcccctgcgatgggggccgggacgcggagcctcagggtcggagttcgggctacgcgggcgcgtggaacccagggaaagagtgaggaaaacctgagcgtggggaaggcggccaagaggggtgggcagatctcattgggggtggcaggattgtaggtgcagcagcagcagcagcatgcggggagggttgcatgtccctcagagtcactaagtgtagcgaagcgaagggggcggcttcacgcagcccaaagtcccctgcatctcttgccaccagtctgcgtcgcgttaccggcccggcgggctgttggtgctggctcccacctgctccctctttccctgccgttggccccgggatgcggagtgtggtcgcttcgcgggaccgctttgtttgggcacttgggaggggagggggtgggtaagatggaaaacccaacaggtccctcttccttcgggcctccaggaggcacgtggcggggtgggtgaccagcgctcagctcgcccgcggctgcgggcgtgtggctggaggtgttcggccagcgcatgtgtgtttgggggtatgtgggcgcgggcgtaaacaagcggagttccgcctggaaagcttgtttctcctacggtccaagcaccgatttccctctctcagtggtgccggggtgcgcctaaccccggcgggcgcgccgggacgtcccctggccagtcctgggaaacgtggggagctgggcattgaagctctggcgagaaggtcggggcggctggtacccggccgccgggtcctgcgcgtctttgttcccagcccccattacacatgcagcgcgggtcccccgccgccctcggtggcagccgcctggagtctgggaaaccctcgaggggcggggccgggcgtgcaggggcggggccggagtccccacgctgctgcgggggtggggatttgggatctgcgtcccattcccaccctggttctaccttctcctgtgcgtcgtcgtgaggcttagtttacaccgaaagcgagtgagttctgtagggtagtagcgcgcgcgcgcgcagcctgagtccggaaaccgaagggcaaagaccagctggcacctgagtaccgtatggaagagggcgttgcagctctcctggagccgcttcttggaggcgaagtggtggtcgtgttggactttctgctcttttttgccccgctcccttgggatgccttttccccaagaaggagtgctcgaaagtgaaaggggaggcattggtctgctagagggagggcggcagcaagctgacttgataggcagaccgcagcccacctgactgcctccagacccgctgggtgcctgatccctggaagtgctggggctcttccaagcccaggcctttaggagagcttcctcccaagacaggacagcttgagacctgggatctggggatcacaccagtctcacacctccctccttaggcagggcagggcggcatcagacccctggaaggactgtatgtcctttctttttcctctgcttcagtcacctagcttgggcagtgctgagcagtgtaccctgccagggggcagtcagagtcacactataaggacctgtattcctgccctgggaggaaggtgggggtcactgggtatttcttgtagtcacatcaaccagtccctgacctgtggagaactgtgaaaagagctgccccaggcccagtttggagcagacctgaccgtcctgttgctttggcttcagggatgccctttaatttcaagctcctggcttgctgtttggaataacccccatactgtgcagcacacaatgcctgctagaaggaacatctagaagagtgctgtgtgacagaaatagtgtatgaactatggatagatataaaacaacgttttctagtagtcgtgttaataaaaggaagaagaaacagctgtgtcttagctggggctgccataacaaaatactgtagactggtggcttaaacagcagaaatttatattgtcaaagttctggaagctctaagtctgagcccagggtgcagggtgctggcatggttgggttctggtgaggaccctcttcctggcttgcagatatctgccttcttactgcattctcaaatgacaggggtggggtggggcaagggggtgttttcctctttttgtaagactgtgaatcctgttctcattacctgatggccccaccctcatgacttaatctaaccctcactacctcccaaaggtcccgtctccaaataccattacactgggggtcagaacttcattgtatgaattttggggggacacattctttccatgagatggaatgaacttcaatagtatattttactggcctggcacagtggctcatgccagtaatcccagcactttgggaggctgaggtgggaggatcacgaggtcaagagatcgagaccatcctggccaacgtggtgaaatgcgtctctactaaaaatacaaaaattagctgggtgtggtggcacacgcctgtagtcccagctgcgccagaggctgaggcaggggaatggcatgaacccgggaggtagaggttgcagtgagccgagatcatgtcactgcactgcagcctggtgacagagtgaggctccgtctcaaaaaaaaagtatatttcactgaatttgatatatacaaagtaatttcagcctgagatcagtattaaaacgagacattttgcattccatttttgtactgtcatcaaaatccagtgtgtgccttacagaacatcctcaactctaactttccacatttccagtgctctgcagaacatttggttagtggctaccatattagacaatggaatctcagaagggaaggtagaatttatggtgtaataaatgtcacatggtgcttgtcacaagatcagtcagtggttagttggttctttaataattcttcaagtcttttgtggtctgtgcttggccgagtgtccttgggaaacaagccatttggctcttgcatttcagtggacatcctggacactcaatgctgtatcctacaagaactcctgacacctgtctctgtactctgtacttggggttcagatcaaagggcttatgggggtggggtaaacagtattctaagtgaagtgaccagagctcttggagagggacctgcctcctgtctatcccatcaggaagtgcaggccctgattactctgataggctgacccaaagaagtttcttggccacttccttgggggagggcggagggagtgagctcatgaagtgaagtgactttcatccctcaggcctagtgtagcggtagctgccaaggacatgggctacagagccatgggccgtgggtgcccctcccagagaagagtgttttctgctacctgtccttgtatctgctgggcactcgaggctctgccctgtctgggtgggctgccttttgggaggaatgggtatcctccctagctcttaggggccctttcaaggcagatgatgtgagaaacctgcccatctttccaggccctatagctgggtaaaaacataagatctaaaccctatggcctcccatcacttgggtgggcctctactgtgtactactctgtgggtctttctgggcatcaagaatctccagaagcacctggacctctgctggcacttcacctaaggaactcctgttataaggagccaatgaagagcccacattctatacagtggtcctccatgtcatagacccctctgagaatctgatgaaagctgtggacccttcctccaggaaaatgtaaatcggtatatgtgtgcatgtgtgtgtacattgtatgcacccactctgttttgtacagatactgggaacctactgccccctgattagactccttgaagtcctggctgccctgcacatatccactgtagtagtcttaaggggcagcttgttctgcgggggaggggtgctttttccaccttggtacctcacttactttgccttttgtgatcctgccggatgttcagattctagccctggtctctctttccagaaagctgtcctcttgagtgccagcctatgcattcagcccctctgcttgggagctcagggtagtgcaaatgagaaccaaggagtatcggttcaggagtttagatccactcacggatactgacctgtcaccatggattgggatctggagggttgaggactgggtctggataatatttttgctagtgactgtagatagactctagatagtcctgaggcagggtcctggttgcatgggcctcactgtagaacagggtttctcaaccttgacactattacattttgggcctgatgatactctgttgtgtatgggtagtggtgggttgagctgttctgtgcattgtaggatatttagcagtatccccgcctctacccacaaattccagtagatcctctttaatcatgtcaaccaaaaatgtttccagatcttgctaaatgtccctggcagaggtgagagcaaaatcatctcagattgggaaccactgatctagaatgttctcacgctttcaaagaggtctacagttgtaagaagtaggggtaacggcttttgagtgcatatccatccccccactctggatgcagggttggaggtgaggttctcctcaaagcctaggagattcctgcttagtgaaatctgctcagcacgtgagagtttggttcaaaattagtggttctggtgtacagcttaccaccgaggagaatcctggcgtccttgagttttcccagaagtggttcaggtttcagggaggcggaggctgtgggtggctgggcagcctgcctgcccgcacccgcccactcgcctctgaccgttgccttaaggctggcactcagcctcttcctcccgtacacgcagaaatgccaggaagtgcctgttgctggggactctctgcctgcccagcagcccctctctgctcacctgggggcctcaggagctaaggctagccctgtctgccaagcggagcactggggttgtagcaggccgtgggcatgccccttcccctgagtggacctgccatgtggcgctccggggagccgcagaggctgtgggcctggagcccccaggccggggacaccagggcaggtgggcagcctctccccaaaggtatgggtgcaagtctctccctcagggtgtggtggccagatgggaatctgagggcagggccaggcttcctgctgtggacctggggaggtgtgggcagcgctgccttagacaggcagccgacactggaggccctggtggagcggttggtatctgtggaggcttgtctattgggcttggcaggctggcagccccctgtggctgcccccatgtttattttctactcctcccctggcctgcttcaagcttggctagggaacgcttctgtgggactctgtctgtctcatcttgaactcagtgagacacagtttgctgcactgggaagtgattacaaactggactcttagggtggaggaagcatttttcaaagacccagtttccaagtgctccacatcactggtatgtgaagtgcttgctgaggttcagacttcctagttccatctgtttttggggtctttacaaaggggactttatttccttctcagaattctttctcttccttccctccggttctatcactaattctgtgttccaaaacagacacccacccccttgttctgggctttcttttttggtctctcattctctaccagacttacgggtccatcccagccctagaggtgcctattccttgtggtcctgggggtactgctactgaatgcccaggttttctggtggtggaaatgctgctgccttcttctgactctattacattgctcagtgatgtctctgactaaggcagtggtaggtactggaaatcaatggataaagcaggctgggattgttcaagggtcagccatgtctcttcccggcccaggaccaataatggcttcccgccttcggacagccccatgctttcccctggttattctaggcttgctgtacacatgcatgtgcctttttcagattctttctgggactggcagctccaactgggtgttttcattcatggacgcatgacctctggaagcgggtgtggaaaggaagcctgtcccactgggcaaatgtgaggccctcttcccaggggaatgttgtctggatgggtctgacctgctggacaatgggccttctccctggccagtttctgggctggagctgaggtgttttgtgaggcgagctcatgctctttgcatgtgttcctctgccgactatttcagttccactctgacaaccaaggaggctaaaattagttctggagaaggaaaaggaaggctggttggaaacccaagcccttggctggagaatggaggaggctgcttcccaggtttgtgcctgagcatttcggaggatgggatgagaccagctgttatccgtccatctgaggagaaggaggggtccctgtggcctcccagacttgaaccaattaaaacaggagactaacttggaagctgactctctcgagtgttgatgccaggatattttttccttctggcttgtgcagtggcgcacagtgttttcaggtatgaggacaatgccttttaatgaatgtccagtgccattgacaaccctcctccccctcccctccaactggattatgtgtccgttgatttagaaagcatgcatgagttttcccagcctgggctggcaaccatggtttaagaactcttattttatgcactttttgggaatttccttctcactgaggtttgatattgggttagaggggagtcctgtggcccagggctcacacaagaggtcccgcttctctgtgtagtgagggcatagtgaatcaaggctcatctgctctgggccttagaaaccagaggagcagaagggttagagagatgaattctggtttcttttcccacctggctggctccttctgtgaaccttctggctgagggtgagacctacagggctgtgtgggagtagaaggagggccagggcaatgtagtcctatctcccctgccctgaaacctcgcatccaaacctcccatcactgagaggttagccaccctggggtatagttgggggagtagaagtcacttcccccataactaattttcccatttaaaaaaaatttattactttttaaacaagtaatatacctacattatattgcagaaatttagatgttacagataatactagggtctccttttatcacttctgttccccatccgaggccccctccaaaggtaatccttttaagattgagatgtattcttccagacatttttacttgtgcatctatagaaatacttatagaaatagagaggcttttggccgggcgtggtggctcatgcctgtaatcccagcactttgggaggccaaggtgggcggatcacctgaggtcaggagttcaagaccagcctgaccaacatggagaaaccccgtctctactaaaaatacaaaaaattagcccggcgtggtggtgggtccctgtagtcccagctactcaagaggctgaggcaggagaatggcgtgaacccgggaggcggagcttgcagtgagccaagatagcaccactgcactccagcctgggcaacagagcgagactccatctcaaaataaataaataaataaacaaacaaataaataaataaataaataggcttttttccacctaaaatggtattcaagcatttaattgaagtataaaacatatacagaagaatgtacaagtaattaccataagtaacagctaagaagcattttcacaaattgaatacactggtttagtcagcatccaagtcaagaatcagaaattttccagccccccatccccagcaagccctgttttgttccatttcagtctctgcccacacccactaaggttaactactattctaacttctaacagcataaaatagtttcatctgtttctgtgcttcatatgaatagaaccttacagaataaactgctttgtgtccatcttttcctcaccatgtttgtgactttaagctatgttggatgtcatggctttttaaactcggagatttgctttggcaaactttctgatacatatggatctactttgatctttttaataactacgtaatattctaaagtttaaatatagactacattttacctagtttcttactgatggactttgtgattgtatagaatgtatgcagactgtttctcaagagtagatgagaaaataacatctggatcataagcacgtatgttattggttttaatagatactgaaaaatggttataccattttatttatttattttttgaggctacccaagtgatggcagtgagggtagaagctgggtgatatggcagttggctctctgcggtaatctgtgaacatccttcctacctccacaccccaacccctgctgaaatgctaggttacagagtttagaaatagcctggtttcatgaagggtgcgcggacatgggaagggctcacttccactggcttaatgtatgaggagacctggagataacctctcgtgcctgtgtctcctaccttgtgcctgagtctcctgggtactgtgctgatgagggaggtagcactggactagccaggatgtgctggtctgggtttgggatggaagtgcatatgtatgttcacttaccaggctctatgctgcgtgcagactctgaagagactaaggcacttgttgaaggtcgctgaagagctctgggtaacagcactactggcaagcccactgcatttgacaaaatctgagtgtgacaaattctgatttcatatgtcgtgataatgacgttgggggtattggagaaacctgtagaaaaactattttagagtctggtgagaagcttttcatgacagaaggagctctggtgagtttctgttcctggctgagtgtatgccttgttccctgtataagtctctgccacagttggcagaagacttagggaagatagtttgggatgacttgttcaccaaagctgttgcttcccagtcttgttcttcagcttgctgcctactctttactgttatgttgggattctttatgtaagtccacttgtcaggccctgctaatggatttagatgacactcaagtttgtggaactgtttctagtacaaatgatactccaatcagctttcccacattatacatatgatgtgcgctgtttgtgtcttagtctgctcaggttgccataatggaataccatagattgggtggcttaaacaactgaaatttcttttcttacaattctggggactggaagttaaagatgaaggtgctgtcaggattcgtttccagtgattcttctctcttgggttggcatatggtagccttcttgctatgtactttttgctgtgtgtatccactccaggtgtctcttcttataaagataccagtcctgttggactggaggcccacctttatcacctcatttagccttaattacctccttaaagtccttatctgtaaatatattaatggcaaaacctgcaattacttttgcaccaacccaatagtcacattggaggttagggcctcaacctatgaattttggtgggactcagttcagtctatgactgtctgaaacaataaagtttggttgaaagtgaattctgttttcctcttgagtgacattttggaatggaagttaattttttcagggctttgccctggtgtctctgttgttcttgcttaatactgcccatggacaatcttgtctacactggtgggcttaatttccgtgtatgtgtgcaggttcccttgcctttgggcatgttacgatcctgaaaatatgtctaaaagctgggtgaaaagtagatatggagatgtacttttctgataatcaggaccaaatatctttctaaaggtaactggagaaactagaaaaaataaaacttctctggttgaaggcattgtatatctaagaagatactgaagaactaccaggccagtatctgcatgagaacaaaggcctagggtgatgattttggtatttgagtctgtttttagtcataggggcaactgagaggctgcatttgatagctttgtggggctaggaagacaggaattggagttctaagcaaagggtgggcagagtcaatcacttatttgggattgagatcccaaagatatagaagttagggggaccaaaatgtagacaaaccctaaagttagattgaaatattctgggctgctgggtttggtggtgcacacctgtaatcccagctacttaggagactgaggcggggaggatcagttgagcccaggagttcaagaccagcctggacaatataggaagaccccatctccaaaacagaaaatatattctgggattaatggtacctttagacatgttaattctttctagaggatttatgtcatcctaggcctcgaattatctctataattttgcaaatacaatgactggctggtaattttaagtaaacagccagcagaaacatcacagttgaaaccaacctggatgacctccaggttggagttgccatatacatatttaaaaatagaagtgttcgggctgggcgcagtggctcatgcctgtaatcccagcactttgggaggccgaggtgggtggatcacgaggacaggagttcaagaccaacctggccaacatggtgaaaccctgtctctactaaaaatacaaaaaaattagctgggtgtggtggcaggcacctgtaatcccagctacttggggggctgaggcagggaattgcttgaatctgggaggcagaggttgcagtgagctgaaatcgcaccactgccctccagcctgggtgacagaatgagattccatctcaaaaaaaaaaaaaaaaaaaaatagcagtgttcactgtggtcaaggaaatgagagtgggaatttcagcagatagctgaaaactataaaccaaaggaaaaatctcttaaagacttgttttacgtaataacagaaattaataaatcaatgaatgcttttatcaggggattaggtgaaactgtatagagcattagtgaattggatgatagatcagaagaagatataaactgaagcatggacaggcagaaagatggataataacagaataaagagaaacgcatagaggatgaaatgagaaggtctaagagtcatgaaatcacagccacagaagtaaaggagagagaatgaggcagaaaagttaatagctgagaactttctaaaattaattaaagacatcaagccacagattcaagaagtcctgtgaatcccaggtaagacaataaatttgaaaaatccacatctatttccatcacagtaaaaattccagaaaacaaagacagaatgttgaaagcagctagagaaaaaaggcattactatcaaaagagctgtagttatactgacagctaacttctcaatagaaacagtggaagccagaagataatagaatgatagctttaagtgctgaaagaaatagttgtcagcctaaaattctgtatcaagtgaagctgttgttccagaatgaagtcatcatcatgttaagtgaaataagccagacatggaaggacaaataaccacattatctcacttatatgtggaatctaaaaaggttgatctcatagaaatagagcgtagaatagtggttaccagaggctaaggaggtaggtaggaggtcagatggggagagggtggtcaaagggtacaaaattacatttaaaggaaaaaattctggtctgttgcaccgtagggtgcttgtagttagcaagaatgtatggtatatttcaaaatagccagaagagaggattttgaatgttcctaccacaaagaaatgataaatggtaatggatttgttaattaccctgatttgatcattacgcagtgtatatatgtatcaaaacgtattctaccccataaatatgtacagttattacgtgtcaatttttaaaccaaaacttcttttttttttttttgagatggagtcttgctctatcacccaggctggagtgcagtggggccatcttggctcactgcaacctccgcctcccgggttcaagtgattgtcctgcctcagcctcctgagtagctgggactacaggcacacgccaccaagcctggctaatttttgtattttttagtagagacagagtttcaccatgttggtcaggctggtcttgaactcctgacctcgtgatccacctccctcagcctcccaaagtgctgggattataggcatgagccaccacgcccggcctacaaaacttcttaaaaaagaatgaacatgtcaaggaatgtgttcttcaggcagaaggaaaataaatccagatggaatgtcagagatgaagagaggaatgaagagcaatgaaaataataaatattcgggcatttattgtgagaatgtgttactgagtttgaaataccacaaaagaaaatgcttggcaacaatgctatctgtgagagtggagtgaaaatcaatttaaattgttctaaagattcttacaatgtccaggaagagagtggaactaccaaataatactaaattttgataaggcatgctatcatctctagggtaaccaaaggatagattataattttcaagctaaaaaagagacaaatgggctgggtgcggtggctcacgcctgtaatccaaacacttcgggaggctgaggtgggcggataacctgaggtgggttgttcaagaccagcctgaccaacatggagaaaccccatctctcctaaaaatacaaaattagctaggcatggtggcgcatgcctgtaatcccaggagggaggctgaggcaggagaatcactcgaacatgggaggcggaagtttcggtgagctgagattgccccattgcactcccgcctgggcaacaagagcgaaactctgtctcaaaaaaaaaaaaaaggcagacaaatgggttgagtgcagtggctcatgcctgtaatcccagcactttggtggttcaagtggggaggatcactggagcccagagtttgagaccatcttaggcaacgtagtgagaccccatctctacaaaaaaaaaaaaattagccgagtgtggtggcattgcacctgtaagtccgagctacttgggaggctgaagtgggaggattgtttgagctcaggagtttgaggctgcagtgagctgtgattgagtcactgtactccagcctaggtcacagagcaagaccctgtgtccaaaaaaaaaaaaggagacatggaataatagagaattcttcagttgagaagaaagcaatgagagacaagggaacatagaccaaatgagataaatatagctaatatttctaataaatatatgatgttaaaattattattatttttaagacagggtcttgctctgtcacccagggtggagtgcagcggtgcaatctcagctcactgcaaccactgcccctctaggcttaagtgatcttcccacctcagcctttgaagtagctaggaccacaggtgcaaaccaccacaactggctaattttttgtatttttggaagagatggggtctcaccatgttgcccaggcttgtctcgaactcctgagttcaagcagtctgcccgtgtcagcctcccaaagtgctgggattatgggcatgagccaccatgcgggcctgatgtaagaattcttaataaataagtaaggatggacctgaatacttactaaaagctctgaggccatgggtggagttggcttaatctagggtgatctgattgggctgttttgggaattagttggattcccctgagaaatatcttctgttttctctctggagggggcaggcttggatatcaacatcctggaagtcaagggggttgagaactaggggttcctgtatttggtatattgttctgtattcctcctgtttcagtgtgatacctgtgtcctcagatttgcctgctcctctttgtcgaagaggctctctgttcattttctttagaaaataaacataatctccgctgggttggagaggggcaaccatgatgagtggtggtgggatctgaggatctgactgtaccttactaaccaactcttctgtctttagactcatttttaccccattctttcaaagacatctggtgccacaaattcctgagttttgaagggttctgtgggggaagtcacattgcttttctactttatccagagccaacttaggagtctgtgtgatcagttaccatgtgtgtaagtgctttccagccttgaaatgtcatttctgtagttctctcctgttctctttgttcttacaggtttatgcattaaactactttattgcagttttagtgggactacaagagggagcaaaaaggaaatgtttgtgtataatccttgacctttacctggaagctctccttccagtgttttccaggaatgatggggcctggaaaaaggcatgtatttcagagctgtgggaggatggtgccagggccttgtttacaaagtccaagttggaagtgacttgaggtcacctggcttggttccttgtttctaggcgggacttctgaaggcagatggagctcctcctgtcaccttggaaggtgctcctgtatttacatttctggcatttgtagtgaacaaaacagtggaaaatcctcatgcaaaatacatagaaatgctggaaaaagtataataaacacccttttaaaatgcatatacattgctgcatgtataagaagtaagggaaaaacaagaaggagctggaaactagagctgtatgccttcactgactgaaactgctgattccttggggactttgcctgtctttataatttagagatgtgggtttaagtagcagtgtggacaataggagagaagatgtggaattgagactgaggcctttgcatggcttcagacttctgttgtgttataccttcagtaaaaatgtgggccagaagaaacatgtctttgttgacaaagagactaaataatgaaattgtctgagactgggtagggttggggttggggtagtttccccgagaatttataaccataggcctatgctcatgtgagcttggcatttataccatcctgttctctggtaaactaagttgagaaattaaagtggttccaaatagttaatgtcctagggagattggcagaaggcagaaatataagttacctttgaaaggttgccccttcaaacttggcctcaaagtagtccaacagaaaaggccccactgaacataagctcagtattcaaaattctaaaaccacatgaggaaacagtaccatgaataaagtcagaaataacaaatgtcagaagcagactttcaagaagttaaattacagaattctaagagagatttggaagtaggccaaagtacagaagtatcaaaattgaccaggaagtttttttttaatagaacttctagaaatgaaaaaatagaataattgaatttataaattgagtagaagaactaaacaacagattagacatagctaaagagagaattcgtgaattggaagttgatcttcaggaattacctgtaatggtgtttagacacagaattggaaattaggaaaggagggttaagagactgggcagaataagaaggtctaatatgcttataataggaatttcagaatcatagaatttggagatgcaatattcaagttgataatagccaagaatttgtcagaattgacaaaaaacacaaatcattagactaaaggcatagtgaaccccaaatagtataaatttaaatatatacttagacacataccttgtagtgaaactgccaagagagaaagcagccagaaagaaaaaaacagaatatctgcaaagttaaattaatagcagacttttcagcaacagtagtggaagctagaaaatagtggaataatattttcagagagctgaggtaaaataacaatctaaaattttatgttcatctaaattgccattcaggaagaaagacaaaacattttgagaaaagcaacaaaggctcctctgccaagagatctctactgaaatattttttttcagtaaggacagtgatctcagaaagaaaggcagagatgcagggagagatgactgtatggatgcttacaaaatatagacacaaataatgtctgatttgggagctgggtagtaagaacagtgacactaaatacggaacacaagcaatatgttaaattagatgtacattggaagagtcattagagtttaaaatatttaagttccaatgagggatggtagagatgttgatttaggcttttagtataagtgtacccattaaagtttataggcctagcttacaacggaataggaatgagatgtataactttaaaagtggctaaaataggaaattttaaaagataatccaaatagaggtaacggtagaaaagaaacaaatttaaacatacccagtaatcatatatataaacatacccagaaatcataaatgtaatgagaccgaactctaattaaaagatggtgttagattgaattggggggagggaagagagaaagattttttgtttaagttagaaaaggtaattttctctaatactaacacacgaaatgtcatatagctatgttaacatcagataaaatggactttttggcaaagagcattcattacaaatgaagagggttactatatagtaagaaaaattttattaccaagaatatataaaataatttctgtaactcaaaggaaaagtaatccagtagaaaaatgagaaaagatacaaacaaacagttctcagaaggaaatgttagtaatcacaagaagatgatcagtctcacaagtaatcagggaaatgcagatccaaattgtgtaccatttcacactcaccaggtgaaccccaggtgggggctgtcatctgttgggaacttggattggcacatccactttggagaacagtttaacagtatttagtcagttgatctttagactctatgacctagccaagaaacgcccacacatgagtgcacacacacacgcacacacacaaatgtaaaaaagaagtcatgatggcattgctgagatcaacaaacataaataacctgagtccagtaggtgagtggatacttaaagttatgtgaggttataagcttctgaaataaatgcacttcagggctgcaggagaggcagcagtatataaagaacatgcactctagagacaggctgcctggggtttgaagcctgattttgacacttaataagtaacttgggtaggttacttaatctctttgtgcctcagtttttataaaatgaggacctgcacaggtttatcgtgaggattaaataagttactctttgcagaatgcttagaataggacctgggatgtagtgtgagctgtataagtgttaaattaatgcatatcaacctggatggcttacaaatatatggatgaaggacaaaaagcatatgtattagagattgtatttggttgctagaaatagtcaagagttattctcttgggtaaaagaaatgcaaagacacaatgttggaatattttgggtttttttctcccctattgtacatgccgctccacagtgtgcatacacgtgtgtgcatgtgtcagtgtctttatctgttatacactccagccttccttcctggccccatctgtctcttcaggttccctccatctctacaccccagctgcccttactctgctgctggggaggtggtggagatgctgctttgtggagctgggggctgtggaatcataacatggataagtcactgctcttggccctccttcgctcttatggagggacctgctagggctataaaggcagctgagcagactcagggctgcctttcgaggggtgctgtctgtggggagagctgcctttcctctctgggcagatgtgaaggctggacaccagagggagaacactggccctcctgagatgttcttgcttgtcttcctcttgggcatggaggcttctggcagggtgtgcctcagtgtgctggcagaagcagacctagatagatgtagtggtgagtggcactccttctcacctggtgagtggcactccttctcaccactacagtgcccacaagggtggggctgggcacctgctccctggggtaggtggctgccaaggggcctccaggagccaactgagcagtggttctgctggctgctggggtcacagttcctctaggagacactggctggactggggacacccaagtgcagagctcagggactccaggggaggtgggcatggacactccacctctgaaccatctcctcttctttctctccccattgcactttgagcccctcacagatgggaccttggtgaggtttctcccttttctcctcagggcatagtgggtatgtccaaggcctactggactgagctgcttcataggagaaacgaacctcccagtatttgacctcccagtgcgtgtcttcgagcatccaaactagccggcttaggttctgctaccaggaatgttggttcagagtgcagtctgcatgtactgtgtgtgtgtatgtgcatgtactgtgtgtttgtgtgagggtcgggggtggtgtatgtgggagtggtcctgccaggagggatggtttggggagcactgggtactttctctctactggcattaggccccttggagcatagggactgccccttggggacactgccacttttatttcagcttcctttggaggccagcagttggtttggctgtgactcagggatgcagcaagccccttgtcctggtgtctgggggccatgctcacttacctcagggctatgaagcagcaggcctaagggggtaccataagcacccgcatcttgggagcatggcttctcctcctgccaggttaggcgagtgggctgggggtcaaggggagcctcctgtgcatggatgccctggcttcctgggtgtgggtgggaatctgtatctattaaaaggcagaggtggcctgtggttggagtattgccagaggctataaatagctgagtgtgtgaagaaggagagtctggggaagagagaggaatgggggaggcccctgggtctccaggtggcagcagagccctgtggtgagggaggggcatgggctctgaacataaagctcttgtaggcatggtgtgacttgatgggctgggagtcatacaggggacttgtgttatgagggattgtcataggcagtaggggatggttgtggctgtaatatagccaatgtgccaggcagtgttctaaccactcttaaagtgcattaactcaattagttcctacaactaccctagctgtgaagtattggagtaggacttgaagtctggcccgctcacggctgccatttttcgctgggttgcctgtaggaggatctggtcagatgggggtcaggtgacatctttttgaaatggagtcttgctcttgttgcccaggctggagtgcaatggcacgacctcagctcactgcaacctccgcctcctgggttcaagtgattctcctgcctcagcctcctgagtagctgggattacaggtgtccgccgccatgcctggctcatttttgtatttttagtagagaccaggtttcaccacattggccaggctggtctcgaactcctgacctcaggtgatctgcccgtctcagcctcccaaagtgctggcattacaggcgtgagccaccgtgcctggcccagctgacatcttgaacccttgggtcctctgagatttggaactcccagcctcttcacttgggtactgcccatggtagtggcaagtgggtggtccctgacttatcagtggcctggagagaggaggttactctgttggcctcccttgtttgggctcctgcctcagcacagaggcttgttgcttgtctgaatggagatggaaactctttgaggacctagggcttgggctgcaggctgaggccatccttgttgtcccctcctttcgacatgttgctctagccatgatacctatacccttctgtccttctgtctgtccacccatccatctatgatgtgtttggaatgattctgccacttaggacggcaagggtcctgcctttgtcggctttccagtcttgtggggaaagcctgacatttagaaagtagttgtcgagtacatgtgtaatgttttatttctcatacaagtgttcattgtgttatttcctcttgagattatttttggttatattattggtacactttttggatgtctgaaataatcctttaagcaacaacaggccattagtcaagggtggttaagttaggtggcaggggaagcacaagggccagtggaaatagagagtttgcctggtctcaggggagagggaagagccgaaatcagaggaaggtgggtaaccttacggccagaggtggtaacttccgacttacgctaagcctagaagccaaacacattcaagggtgtgacattatggtgtggctgcagtgaggggaggaaggtaggggagtgcccagcttccctgtctgcagtgcagcttcatggctggccccacaagtctcaggtctccacggacccccactagaactgctgccgtggatgcagtggggcccagcctggggagaggaggccctgtggcctctgggcagggtgcttcgaataacccagtaattgggtgctgctgcaggcagacagggacaatgtaggtgcaagcctcagtcctggccccggtgtgcttgttcagcctttggtctactacccccaccccaccctctcaggttctccctctaaaccttaaagccacatgcttgatgaagggcctggctggggaagccagtgtgtacccttgtaagcctctctgtggaccctgaggcccttcctttagaagaggctgagtcccagctgactgactggtcaggaggccatgcattttcctttcacaggtgtcagagcctaggccacctggtgcaggatgaccagagctgtggctgggcactgccattctgattgggtgacatttcggacccttaggtgctacctggatccttgagattcgttgcttgctcctgcccctggaagaagcatcctgtcacttcagggagttgcagaaaggggttgggtttgacaggagaatggccgctccagtggtggggggcttctttcacctgacagccagtcagtatccttctctctggggtataccctgggaaatcaagctctttcctcatgaaggccaacagtaggggtggagatgagcgtgaggatgtccttaggctacgctagtgttcagggtactttgccctcccccagggtcagggcagggttcgtgttctttcctactccagtcagcctttcaggctgatggcgaagtagggctcttggctgctggtgggctggctgtctggtgggattgactctgacccctccctccttcctgggatgggaatagtggtaggagaagaccagccaggagtggtgccaggtcactggcctatgtgggcccaaaaagtgtggataggatggctggatgcttggtgcaactatcctctcgggtgtctgtgtggggttctggcagtgaggttgtaaatgccaccacctgcctccattgtgggcggcctataatggggtgctggcagagctctcagacagaaccgaacctcctttggcatctccatactctttcctatgtcagggctatgtggttcctgcgggtagtgggagtagactggggctgggactggaggttgttttgtaggggatggtgaggaagatggatttggggaatgtttgaaatcaagtttgaaggaaagtgtttgaatgggcaggtgggggttgaagtcgttgtccacctggatggcacttcctgcagcaggtggaagggggttcagaagtgatggggagtgccctggggtcatcaggagcctagccaggagaatgatctgtgattgcaggttaagccaccagctagctctcctctgcctgaggcatgtattccccttggtgactctgggaggcttaccctgtacacgcaggcctcattccttaagttctccagccctgccgagcaccaggtgtggttgctgggtgtagaaaggacacttacagggtcctttccattccgtatgggcagggagttgtggaggacccactggcatggtctccctggggaactgttgtgagaagggggcttgggggcagagacaggagcagcaggaagccactcccctttgtagttttcccaggtggtccttgagatctttatcacaatcacctgagacagacaggggtgattaaaagcacatattctgcccccattcccattgggatgggtctggattgggcctggaaatacgtatttgaatgaacactgctcccctttcccacacctgcaacatacagtgattccgatgtgcactggggttttaagggggcctcttcatcggtttctgctgcagcagggaagtagcccccacccccacgcaggagcctcaggtgttggtgccctttctgtgcatctggactctgtctgtctggctgtttatccatccttctgtggcattaggtttcctgcctcctcccttttgcttaggcctaggggcagctgtgatgggctgcagaatgaggtgggggctggtgccagctggcacacgtaaattaagaggtgtgggacggatgggtggcctacgtccaggggtgagtgcaggaggttggtgaccccaacccaccacccggcctccctccctcagggtggcctggcacccaggactgggagtaggggtttgggtggtggtcccaggggcatgctcagtggttctcttttctctggggcacaggctctgggcgtggggaggctgagacacgggagtgcatctactacaacgccaactgggagctggagcgcaccaaccagagcggcctggagcgctgcgaaggcgagcaggacaagcggctgcactgctacgcctcctggcgcaacagctctggcaccatcgagctcgtgaagaagggctgctggctagatgacttcaactgctacgataggtaccccaagacttgccctcctttcctcttggacccacctgcgcttatactgcccactgggccatttgggtctcaggatgtctgagtgggagataaaggaccaagaaggggctcttgagatggtagccatggccccacgcccttccacaccctatttgtcctaccttagccctgaggaggggtctcagtgtcaacccctggctgttcttccttggctttgggtctcctgtaggggaggtgagttcacaccgtccccctggtgttgcccatgaggtgctctgtctgtgaggaggggttggcagggcaggcctgggggagtcttgcatcccccaggtgaggggtatatggaaaattctgtgcctccaggcaggagtgtgtggccactgaggagaacccccaggtgtacttctgctgctgtgaaggcaacttctgcaacgaacgcttcactcatttgccagaggctgggggcccggaaggtaagggggcagtgtggaagtggggccttgagtcagccgacctgggcttctttggcttggagcgcttggctcctcagttgggtggggtgtggctacagggccctgtagtctggctctggaagtgtgagggtgggcagactgtttgacacagggctctgtgtgtcccccagtcacgtacgagccacccccgacagcccccaccctgctcacggtgctggcctactcactgctgcccatcgggggcctttccctcatcgtcctgctggccttttggatgtaccggcatcgcaagcccccctacggtcatgtggacatccatgaggtgagacagtgctggcttggggcagggcaggatagaggtggggaggacaggccagacctttttaagccttgctctcccccaggaccctgggcctccaccaccatcccctctggtgggcctgaagccactgcagctgctggagatcaaggctcgggggcgctttggctgtgtctggaaggcccagctcatgaatgactttgtagctgtcaagatcttcccactccaggtgagtgtttgaggggctccatccaggtcctctgcctccactgtagcttgaactggaggctctcctgacctggggcaatccaaaccccaaataatattgtggtatgagagaaaagtgagccttactgggcctagttactcatgttacacttggctggtctgtagatttcatgcaactatggaattttatcataggactagggtagggctttgcaaaaccttgatttgccccggttaccagggttttgtttttgacattgggttctttccagcggccctggacaccaggtctggctctgcctcatttgttgggtgatacggggtcactcacaccccatgcatggaccttagtggccccatttgtaaatcgaagtgctagccttaagtgatctcagggatcactgttggcctcatgctctggggcctagcttaatacaggtcttctcctggtccccttacaaatgctgaagctgggaggctggggggtggggattgggctgggaggcttgagggtggggaatggggaatggttgttctgctgtagggcaatgtgactgcagcagggctaagccagccacttgtccccccaacccctcgcccccggcctcaggacaagcagtcgtggcagagtgaacgggagatcttcagcacacctggcatgaagcacgagaacctgctacagttcattgctgccgagaagcgaggctccaacctcgaagtagagctgtggctcatcacggccttccatgacaaggtgagccacacccatcagaatggactctgagaggagatggaatgtccccttggtggctctccataatatgatgaccccttccctgtggaggtgtccaccatgaagtactctgccccggtagcactatccactatggggttactcctgccataggtgtggacattggttcccctatgataggaacctctcaccctgggataagtttttatgataagagtagtgactccatgattcccacccctagccctccctgcctcctggcctcatccatcttccatatcgattgtagtagccttccaggagagcagcctagccattggcccactgagacttctctgccagggctgggctgggtcctgtcctgtacccagaatctgtgctcaagttctgtgctgtcttctctcagggctccctcacggattacctcaaggggaacatcatcacatggaacgaactgtgtcatgtagcagagacgatgtcacgaggcctctcatacctgcatgaggatgtgccctggtgccgtggcgagggccacaagccgtctattgcccacaggtacctgggtcagcaggtgcctttcctgcacttgacctggagctgtgggaagggttggtgggcgagagcagtgtctggagatgtctcaacttcctaaacatacttaccctgcttgctgtgtgtccgaggcagctgggcacaaaacctggccttcccactgtgtcctggggatggcatggcctcccaagctggtttttggtgccctctaatggccacatgaagtgctgactccattactttggttggagagttggctcagtagttctcaaattttctagtttaggatccctttatactcttaaaatgacttttgtgtaagtggattatgactattgatatttgctgtatttgagcacacccacacatcccattcgctgtcagagtgaggacatcacatctcatgtagcctcgggaaaactctatgctcctaagagaatgagccttataaaagcaaataaatgaaaataattttgactttatagattcccttggaacagtcttagagatcttctggggtcctcgaaccaccctttaagaaactctggatgagctcatcactgtcatgcttactaaatggcaggcagtgctctaaacacttgagaagtatcaattcatttgaccttcattaccgcccattgagacaagtactgtatttctcagctctgtcttgcagatggaggaacagtagtacagagaagttgaatgacttagccaaggtcttgtagctagttgagtctggttctgtgactgtgagggaggggaatgaacctcaaattccagcgttcaaagctgaagggtccctgatggtaataacagtaatgacatagaaggtagactgtatgaaattgccgtttttataggtcaaaaggttgaatgttgtctctgctatatggctcaacttaataggaatacctagtaagtatgccaggtgtggccctaaacatttgcacttaccactcagtcgaatcctcacaaggctgagacaggcactggggaaactgagtaccacaagtagctttgcttagttagaggtggagctgggtgcatgcaatagcacccttgctccagccggccttcatggtgagcttgagaccctaaggggtctctgcaggatcctaggaaagctaatattaaattcctattctcattcacattccaaatgctgtaaattcttctcagaaaacttgcatcccaggccagtgtgcctgtccacaacccctctgagaatatatgggctggcctttgatagtgtggggactgggacagggtctgcccagccattagggtaggtgttgctttgccaaccctgggggaagccttccatctgaagtgcactgagggattctcacacccatgtcggcgcctgcagctgcctgcttgtgctgcttcacctctgcaccccaggtagggtgggatggcctggtctggggcctgactctagggcacagactctagtatcttgggaaccaaggtgggagttggatcatgatgttaagctttatctctgcccacttgtttccacagggactttaaaagtaagaatgtattgctgaagagcgacctcacagccgtgctggctgactttggcttggctgttcgatttgagccagggaaacctccaggggacacccacggacaggtaacaggcctcacagggcaggaagagagggacagacccagggtagatactttgccctttttgtgctcagctggggaggtgcagggatgagggtgactgcatgcgttcagagctgtctgagaacttagagcaatgctcttgtttgaccagtggagaaaccaagaccaggaaggcagtgtagtttagcttccgtaggacagtcagctgggaaatgtagagattccccactggggttttgaccactagtccttgcaatcttagtctttctctcacttttttagttttaattcctaagacaaaacaaagaaatgtactaaggatccaaacaaagaacctggaaaaagtaactaaaaattaaacttaggaaatcattcctaaaacaatcactgttattattttttaagtgttctccttccctctttgtttttggtcttaatctcagtcagatacatatcatctgtagttccttgtattaatttggtaacaattccattttagattactattatctccaggatatagtatttaaaaattattagccaagtataattgatgctgtgacctcttgtaactgttgtgaatgtggtgaatcgaggtttgctatcattgataacctgtctgaattgctctgtcttgcccgccatctggtgcacagaggctgtaactcccatgtcccagctgtgtgtgtatggccagtcactgtaaatcctgccctcctctgtcctcacataggtaggcacgagacggtacatggctcctgaggtgctcgagggagccatcaacttccagagagatgccttcctgcgcattgacatgtatgccatggggttggtgctgtgggagcttgtgtctcgctgcaaggctgcagacggtaagtaggatggcagccctgggcatcctagattgagtgatagggagcagtgggaccttagagtgatcctgccaggctctctctttctcctaggacccgtggatgagtacatgctgccctttgaggaagagattggccagcacccttcgttggaggagctgcaggaggtggtggtgcacaagaagatgaggcccaccattaaagatcactggttgaaacacccggtaaggggcctggttcaggcaactttgcaggggggtggagaagggaaaacccttcatgtgtagcaggtaagctgaaatcaagggggaatgggcaaatagaaagtctgcgacgttccctggactctagggatgtgttccaggggttatggggagtgaggtaggatgatgtccttctcctgatccccactttgactgaactgctacattttgggcacttgtatggtttgggcttccaataagattttgtttgaatatcagcacttcaaggcaagtagtggtgtctatcctagtaggggccttggtgtctccttctccctcctgtgtatgttgaggttcaatgaacctttcctagggctgtggagtgaggccagtaagctcagaaagatgactgccatgaaggcaggcatgctgattcctgaagttttccccaggcctctgctggtggacctgctgctgtggttggggctggtgggctctgcctgatccttgggaatatcaagtttactgtcccccaaagcttttcctcactgaagggtcctaacaaaggtgtctttcctgtctgccctatgctgcttagggcctggcccagctttgtgtgaccatcgaggagtgctgggaccatgatgcagaggctcgcttgtccgcgggctgtgtggaggagcgggtgtccctgattcggaggtcggtcaacggcactacctcggactgtctcgtttccctggtgacctctgtcaccaatgtggacctgccccctaaagagtcaagcatctaagcccaggacatgagtgtctgtccagactcagtggatctgaagaaaaaaggaaaaaaagttgtgttttgttttggaaatcccataaaaccaacaaacacataaaatgcagctgctattttaccttgactttttattattattattataattattataattattattattaatattattttttggattggatcagtttttaccagcatattgctctactgtatcacaaacagcggacacgtcagcaggcgttgaggtgctgagctgtggatgcagaaccagcgccatgctgaagagcctcagccacctcctgtcctttgggattcgtttttcccgctttctctttgtttgtcgtctcagaatctgtgacacaaagaaacccatctcctgtcttaggaaacctaatgctgcaaactctacctagaggaacctttgaagactgttacataagaacataccttcctcagaagaggagtttcctctgccctctgcccttctcccctgcctccctccctcccctccttttattttgttttagtgagcttaagaaacagcagatgtgtctttcacggatctaacgggtgttgtcctgatcgagaaaaaaactgggatgagaatggtttggactggagttggaaggggaggacggtactgggggtagggtttggaacagagctacactggactcgggcacattcggagcagcatcctttagtatggaggctacttctcaggtaaccaggaattgaggggaaggaccttgtggaggccgagcattaacagcaagagcggggtttggagaaagtctgagattgggtgcagccctgacttacctgctggccctgaccagtttcttttcactaacttggccttgggcataggatgaaacattttttctgccctaattttaaaactaggtgagggtagaatcatcacaggttaggaatacattcttcataagacacgatgctgtaaatacccttaatggacgaaaagttgaaatacttttgtttcctcttggagcagttcagggaaatgcccacaggggattgtcctgcacagatagggcaagaggatttcctgggtggagtctgccaaggcctgcctcgctggggaccccagagtcctgcacctctggttccgccccaggtggtgacattactgtccccgttctgtggctcgtggacaagactttctccagaccccttaaagtggtacatattctaaaaaactgtttttctattatgccataaccttgctctagtcagtgaatgttcctaatgctgctgtttcaacatttgaattctttttaatttatgaaacatgctaaattttttttttcaaacaaaacacacacatccacatatacacatgcttcgctatgtggcttccaaggtttaaattttgaaaagtaaaagaattaaaacttcacgaccacagatcacctcaaaccagaaatacctcagaattttctacttatgtaaggtttattatatattttgttagttgtgttgtcttgtagtaagtatattttaatgtaagttggcttttgtgacaaggaagtttaaaagaaatagagaaaaagaaaaaagtttgcatcttctagggagtgctaccatttttgtttgataacgcccccttgtaaataattgtcatcaactgtaggttggctgtctgggccaagtctgggcatttatcagtcttgtttgtgaaggcttttccttctggtttctttagatcattttatttaaaaacagtgcatctcttcatcgtgagggtaggcaaggcgggggccgtggggagaggttgacctgggtgagaactgaagaggccgcctcctcttgggttgtttggagcttcacatgtaattcacatgtaacatgtaacttgatcggtcagtgttcagaatgacaagtaaccccgcttaaacttggtagaaggatggcccttagacctgaatggggtgattttacttgggatttaacttcttcagcaaattaacagcaacgttggaagagatctgtggcgcctctgtgaagcacaccgtgactcaggccagtcttttagtgcagcgtgtctgggagtgaagggttttgcccttgctggtcttggagtccacagtgtgaggggcactgcacatgcctgggcatctacctagtgtgctatgttcagtgtctggggcttactgccccggggtcctttcctctgggtgttggggcacagggtgctatgggaggcccatttgcttccctctcggagctcagtttttgcttcatgggtcaaaatgtgggctggccaagtggttacaggaacagggtttcggtaagctatgttgtctttttttttttttttttttttttttttaatggtttgattttgtgctgtggtattttttttcccttagaataatttttaatggcaaaacaggccttacagcagttgcttttctttaccatttatttctttaagaagctttaaaatatttattgaaaagtgccatatctaatttctttagctttcgcctcaggcagtgcaggcatctttacttttcatcctcagaagaaacaaacgactaacaaatgtagcaaatttactgcaggaatagttaggtcatgatactacctgaacactaaaccccagcctctttgtttggttttagttcctctgggtggtttttcttttgtgtgctggcttgattcttgtgagaagttttgacctggccaagggagggttgagccatggttctggtgtgggactttgcggtcaagacacagtacagacaggtcaggcctgcgtgccttttctctgggtggcctccccgttaggcccaccgtacgctcagccactatagtgtccctgtggggccttgccatcagattgtgtgtcaggagatggtacctttttggtgtggctggggaggagtgtggtccatgccagttctttgggcttcaggccactcttcccctcatgctgtggtgtaaagtgcacccatcaggtggtatatctggttctgatggcaagaagaaggtgggggatctccttatagggcatgggtctaggagcacagatgggccttttgccccgggtaaatgcttgtctgtttgctgtcatgtgttctttgaggagtgagccatctcgagccctgctttgaatttactgggtcatagagcctctgcctgtgctcttttccataatgacttcatgtgacatgcacttttggtgggctcagataattggtttctttttgtttttgacctcaggctctgtggcagactggggaaaatggggcctggcatcattttccctgtcaatgggaggggctgttccatgcagggtgggaggggaccaagttagcagagagtagccaaggatccttgcttcttcctttctagtgtgctgtcatccaagcaggctcctggctgtagggatgggccttggggaagaatcttctttgaaagcatctatgataactgagaagtcatccctagttggagaaatccagtaatgagcagaaggaggaagcaagtgaggacagaggccattgtattacagtgtcacgcagagggccctcaatgatggggcattggggaaggctgtagacatagtcatcagaacatcctggcctggcataagctgggttttctcctgggaccattggtcctcagcaggagttctttgcatgagttgctcaggggcaagggctgcaagtgggctgtgcttaggagaaagtgacacctggcagtgagggaagatggtgagcattattagcctttgttgtccagcatggccttcttgtcctgtctgctctggagaggagcctgtgggaccagtcctgcctggggagggcatacccacacgtgccagctgattctgactctgaatacatcatgtccggacttgggggtgtttctgcagaaaaaggaggttgtttttcagccttgaacatcttcaggaggatagagactcttgctcacatattcttagcaaagggaagggtctctcatctccaggccacagagatagttcttccattgccctaagaggctaggctaaccctcttgacataacttagacagcaaagcacttcatcctgtagttgggctctgtcacctttctcttcagttggccacattctcgtttcctccatcctgctatgctttgtgtgctcgggctgtgtgtggggtttttccctggtggaaggaagcccagctgtgtattgaatgtccttcatgtgttgtgtgtggctcagaaagcctgtcacttggcccctgtgctctgagccgtgagggtggggaggtggctgttccattaaagtgggagtattggatggccctcttgaaactagaattttgccttttttagtatgcagtataaagtttccagcatctattggtaacacaaagatttgctggtttttaaaataatacagtaagcataagtatgtaagtttttagaattggtactagaagttggacagctagttattctcgagaactttatttcactagaaaaatatactaattggaaagcagtttccaggagttaactcagtttaattttcagtctcagttattttagcctgttgagtttttgatggcacacctttggagagatggccacgcctgattcccatttcaggggcatcagaccatacctttttaagaagctccgtgaatctagtcatctacccttcatcctgggcgaacagccaaaaagagaaggggacaaggtgtctttttctccttctcactggggtgacatgaattcttttagttaatggctgtttgcaaattctaaactaatgaaatacttagcagctaacatgttcaatctagtaatgatgagtttaaatctcaattgacagtaatgttttagataaacaggcccagtaattcagttgatgaactgtatatcttctcagtctagatttgtaaatgtttaatgaattcagggttataagcatagttctttaagtaagattccagatagttgatttgcaaccagcagtctacctatgaatgtatcccaaacctttagaagattggaaaagatttttgaaataatgatttagttttgtaggaaaaacacccccttgaaaattaattcggttgacccagtaacattttttaaaacaattggtggctccaaaaggcctgccaacaaagaaaagtccaaattatctagtgggacattttgaatgttttatgtttattttgggtccactgtaaactttggttcaaaaaagaatttgaatttaaagaatttaccattatttaaattattaccaagtttttacattttcatgatggtattttccaggtatgaatgaaacatgactttttgattgtggtacttcctgtatcccctgtagtgccaaaaccagtgatactttatttgctcctatggcagctcatagaggtaaccgaagtgatttttcctcagtaattgaaacacatattctctaaatgccaatgtgtggtgatgggccctgcactgccttcatttctctagggcagtgtctttggattgtctagggcctaggtaattctgagaactactgtaaaccaaccacagggcactaaagcaatgtacacaccactctttgtgtgtatggaaggggttatataaacctgggctatgctggacatctacagaagagtattacattcacttgcaaagtttacatttttgagctcacagttatgaaaaatatgacccacaagtttttcaggcaggtgaggatgggtcttcttgcaaatgcatgagttctgtcttgagtcctgggaacttctctgttggttgagtgtgggctcattccctgactctcctaatcatgtttgcgtcagaatgttagcattgtaaataaaagaataggttgtataatagatacacaacacttgaaactttactttaaaaaaatcgatagttctacatatatatttagttatatcacttgacagatttcttctacacagtgtggagattgttttataccacagattatttttataaagttagtgaatttgaatgattttgtaatcagagctaatgagctttacctttcaagagaaacgtacactggagcatgagtggtgtggaacttttacttagtgtttatatggattcttgtgatacactggcagactggagtcaatttgcgggtcttttttggccaaaactccacttgtggttgtgtaggacagtgatattcagctcagcttcttgtggattgggaggagagagggcctgcaatgtgttttacattggtgcttcctcctgagatttctgttgaacaaagggttctgaggtcaaaaattagtttgtaagcctttgccataggacatagtcatgtgagagtgtttgggggaacagaaattgtataggggtgcctattggggtgggatgggactcgaataagattcaggtacaaaaactttgaaatgagaatctggtggtttgagtaatccaccagactgaattatctaagatcacattatccaggttggggggcagaattacccagttaagtaattgttcagaaaagtggggagggtggcatgtggatgcagtgatccaattaaatggagagctgccaggcacattttgtcctctctggtcagtgagaatggttgggttggctcgctgcttcaatctgtggaatcagccaggagcccagtgaggaagctcagaaccccagtaacagcagagcatctttcagatagctccagagttttcctgcttttctgaggaagctcagcatcactgccacaatacggaaagtggtcttcattttagcctatttatttttaggcagagagtggatggttatttgtgtgggacttttggtggcgatatataatgaataattaagttaatttctggtatgcataatggccagtcctgaggcccagctgaagacctgtcccccagaccctgcccgctggcttcaggctgctgcttctagacagaggtgcactggacgggatagttttatcaagagaatccctaatgtgtcattttaaaccagctgtgctttttattcattctggttgagcgtataggtttacactttaccctttttatacttggaataaatttagttccagcagatctagtagcactccagaaaccaaccccatctgttccccataaaaagaacattttctctgctctccagccacgtgtcttggaatgtaattctgttgtgcctttgtttttatcactctcttcgccccaaaagcaactgctgtaagcttttttctacttgtcttttctagtccccaacctctacctttttcctttttcccagccctaatttctggatgcacttctgtgatccaggtattttaagaaccagttacctcagacctcatgttgaacagtgtcgccatctgggtcctcttgatactgcagacttttaacgtacacatgcaggaaccctgctgagcgtgggcacttgttttaaagcaaaactcttcccaaggactgaagaaagggcttctggcaagctcgtcatggcattgtggtgggatgggtctagagtgtcatctgaatggtgcttcctgtgttcctctttgaattctgccattttcagtattcttgtgtgtctgaataggcaaagcgatttaattggctggtcttgcacgcaaattagttccaaagataagctctttgtaacacatttccagtcgctaatgctcaaatgtagaacattcctttaaatggcaggataaaaaacccactatccaccatagtgcattttgggaagatgtctgtagcatatgttgctgtgaaattaggccttgtgggatatggctgtttgtcattttgatgtattttaaataaatatatatattttttaaagagccttttttaccagttcaaaaagtttaattaaccagcagtcaccgcatctgaatttttgtctctggggcatagatggcagaccaagattaaaagtggtaactcagctatacgagcatgggctaccttcctgggctctcctgcagtcctgtagacctgctgttccgcagaccatgggacacaaggtcagtgtgttcccagtgagggtcccaagtcagtcatcttaagtgtttgttctctgccccattcagtggactgttgacttcagtccctgcaagtgctttagcccgagtggggttttctcagagcactgccacgagttaagtgtgtgtttagccaaataatttctccgtaagggaaaaatgcagtcacccaaattttaccaacaatgacagagatgagagtagaaaagattaggcaacatctgagttttaacttgaaaagtgtccaagtcatcatgaaaggccgactgggagcaagtgattattagagattcttcaggagacctcatctgaaaatgttaagactgccagtgagggaaggaattgttaaaatgccagcggcttttttttcctctttttttctgtaattctgtaaaaatgcagagaaagttgagtggtacttcagaattgagggagagggttaccgcagagtagaaatatatttctagatttcagttccacaccacaaatccacaacaatgccatttttcaactgtacaaaaatctgcttatgaactggacatgatcttaatggtagtgtcaaaggccaagtttttcacctgttaatatttttccacatttgtccttgaatctgaataactttatacagtactgtaaatttaacttacatcgagtttgttgtcaattcttatgaaaagagctttctgcatgtaacacatacggttaaagaacacagcaaaggacaaaatttgcaggaacagttttggaaccaacagaaaatgtcaccttttatttgccatcttatatatatctatcagttttaccagctacttctaaatttgtacattatttgtaagggaaagaaggaaaaccctaagacttgtctaacttagtggagaatgtgtgtgttgggcttaggatggatagctaagtcttattgagctgtgttacctaacttgtatataaaaattgtaattaaaagtttgggttcacctgtttctcacagtttaaaatgatgagtaattgcaaactctggaaatgtgactagtatatgatttaaggctgtagaagcaaggaagctctttcaagtgctaaaactaaagacttctagtttttggctcaaataagtactgtttgtataccaggatatgtgagatgtaaatgtagtaggtcacttttcacccttgtagctataaaataaaaattttgtagaacagaaatagcttgtactactgaattaacaaaagttatactaaagtatcatgtttaaaaaaaatatatatatatatacagagttaagcttgttgctgttaccctgtctggatttgaaaagtgtgctgatttatatatatatattacacacacacacacacacacacacacacacacacacacacacacacacacacacacacacacacacacacacatacacctaaaatggcctaaagcagacatccatgtaattacagttgcaaaatgaaaacattttggaaagaacattgtatcatagttcattcatttgcagtggatctttgttcctttttactgtggtaattttagaaatgagtgtcaagtttgaaattagatctgctaagttggggttttgctgcttgaactctgcactgggtcctcaaataaaccgatgtgaatgtagttttttccccctgtgtgaagaagcagttacaccccaacaataggaggaaaaatctagaactatttcaagttttatctttttgtatatgaaaataaaataataataaaacaatcttgtctttcttaattacgtggcaggggattggagtttcctttcatgaggattagacatgaaatgaaatggcgttcggctgcttagagggctgactcaagtcagttcctgtttggtatgtgtaacattaacagatgttaatggctgaatgcctagtctgccatggtcctgtggggctggagctaagcacaggtctccatttctgccattcagaagtccagggtctagttggggacattatgaatggggaccattctcctgaacgaactgttctgggattttgagtaagtttctgcaggttagcatattttccaaatgtccaagacactccccattccctcatcctctgccaccagtcctgtactttgcagacaaccctgagcaatattgttgtaagtggagcagagaagccttgaaaatagttgtattcaggactattgcagatgacaaactctgtcattcccaaacgttgctgagtactggagtcatttgcggagctattaaaaaatacaattatgggtccttatccccaacctggaattagcaaaccaggtctccagtttcagagatttggacttaatctcactaaaggaactcatggttccccaataataaaataatgatagtctttaatacctaacaaaacaggaaggccccagaaatcacctcactgctttctgcagtaacaagtttttttggtcgatgactctttcttgcctaagtggagaaacaccctttaaattcaccctttattatgagaattaagcaacggtttgaaacttgtggagaaagtttttgatgaccctttattcagggaccagttgcccaatatttggctgtttttgctctttcacgtttagaaagttcaccttttattagtgagtgcctctaatgaaggaaggagagcaaagggctgacatttttgatacaggatcttggagctggaaaagctgaaaggttggaccttaggagtcatctggtcaaactttccctatagcaaaggaattctttgaccaaagaaatttgacacagaagttggtttataaaaccaggcttgtctgaatgagcaagtagaagagggccaagggaccatttcacttaccctcccatcccttcctttaagtctcaggtatccctatggaacacctaggaaccttgattaaagtttacaaatcactggcccaattccaattttacaggtgggcaaacaggcccagagggagttttcctaccctgaggcaggcaacccttccagttcttgacctcttgggaccaaaagtggggttacacttgttcagaagtagaggatctggattaggaaaagccatctaatatttatctctctagtatttagcacagtgtctggcacttacaagggccttaagaaatacagtacctcagtgattgtgtatttagtaaattctggggaaagctgctgaagtagccttgaagcctacagataccagtgttgtctggttgtatttgttaggattcttggttgcaggtgacagaagccattagacaaaaaagggggtttcactgaaaggattctgggggaaatgactagccaagacttcagaaaggcaggatgtatgtgggcttcaggagcctgtgggagttggggtcataacattgcaggcctccacctgtgtcctggtatttcttccattattgctcagagcaagaccagatgcatctgctcctttgacttcttagcaggaaacaaggctgtagacagtgccagagcttttttttttttttttagacagagtcttgctctattgcccagattggagtgcagtggcacgatctcagctcactgcaacctccgtctcctgggttcaagcaattctgcctcagcctttcgagtagctgggattacaggcacgcgccaccacacctggttgatttttgtattgttagtagagacggggtttcaccatgttggccaggctggtctcaaattcctgacctcaggtgatcctccagtcttggcctcccgaagtgctgggattgcaggcatgagccactgcgcctgtgagttttacgtcacagctttgctacccagagagactactagatcgaaaatccctaggaaggactctggttgatgtagcttaaccagtcagggtccttcagaagaggtattcctggcaagggggtagcctcccatttgaggctgtcaaaataatgtgcacacttcagtaggttgttagaagtggcctcctggtcagtgaatcatcagtgggatcagatgaaagttattcctaccagttatctaagaaataggaaacttgaagtttctgctaagaactaagtccacacggaatgctagagatcatgctgcaaaatgaagactcatttgtttgtgagtggtagtccatgaaatctatcctttctttgccagcaggcgttcagcaatctggattttatattctatcaagacaaagagtagagatgactcaaacatttctaacatttatagagcacttagtgacatgcccctggtacttccctaaacattttacatgtgtcatctcctttaatcctcacaagaacgctatggtctaagtattattattccaatttaaaagagaaggttggggacagtgacacacacctggacttacagcactttgggaggccgaggcgggaagattgcttgaggccagaagttggataccagcctgggcaacataaggagacccccttctttaccgctcccccactcccgccaaaaatttagccgggcaatgtggcacgtgcctgtagtcccagctactcaggaggctgaggcaggaggatcgcttgagcccacgagttcgagatcgcagtaagctatgatcattccactgtactgcagcctgggtaacagagaccctgtcgctaaataaataaatagacctgagttggaatatcggctctggagaccttagtgtaaccatgcgcaagtgtttactcacctattaaatgagactaaaggtattttcttctcatgactatatatagcataccactaagccctctagacatcatattccccatccatcgccccgtccagtggaccagggatgaagcggggatgcgctaggcatcccggtttgtcaccagggggcgtgcgaggccctcagcttggcgggcggtgaggcgtggggtgacggggggatggcgggggccggcatgcgcgcgcatgcgccgtggtaaaaggccggtacctcgggcaagatggctatcaagagtatcgcttcccgcctccggggttcccgtcgttttctgagcggcttcgtggctggggctgtagtgggcgctgcgggagctgggctcgcggccctgcagttcttccggagtcagggcgctgagggagcgttgacagggaagcagccggatggtaagtctgtgggcccgtcctcccttcgctggcccagatttcgggctccgactcctacctggagtgtgaatggcagtccttgacggacagccttcaccgtttgctgggcccctagcctggcccttggtttctgacctttattctcccggctcggcctcccttccccacctcgcgtctcgccagcttccctcatgtccttccttcccccgggcatcttcgttttctgcacagaaccacccccgccgcccgactttcttccccccagttactcatcgcgatatctatgttttaatgtctgtgttctctactaagattgttagctccataagacttgagactatgtctgttttggtctccatcatctaaccagcacagtacctggtacataattggcattcagtaagtatgaatgaaggaataaattaatacataattttagtagatgagttaactgcccttctttcgtcattgttcagttgaagaatacctgctatccctccaaagtgtataaaaactcatgttgcaatgggtaccttatatttgacaaaaaaaaaaaaaaaattaacacgagctcatttcttgtactttgcggatgtgctaatttaacttgctcctttggatacttggcatctagcaagagaactacccccttggggggttgaggatttgagaaggcatcggggaggattatctcgaaactgactcactgctgaatgtgtgcttggtttctcccactaggaaaaacagtaccagttttactgtcatcttgcaacagcacacatatcagtgcttcagagatgatttggaaatttgatgtgaaagactaataagatcaagtctttattcaaaagttaatgcagtagctgcattttattcactgattataggcaaatcagtactttgcctactgtctgttttcttcatctcataagtaattgcaaaaatgagattttctggttgattagacttctgagccagtcctttgtaaatcacaccgctctccttttccttataatctttcattattaagagccactaattgtgtgtgtgtgttttttttgtctctgccccccctttttttttttttttcatttttaggatctgcagaaaaggctgtcttggaacaatttggattccctttaactggaacagaggcaaggtgttacactaatcacgctttgtcttatgatcaggcaaagcgggtgcctagatgggttcttgaacatatttccaaaagcaagataatgggtaggtggttggataaaaaaactgaagtaacagtatttatgaaagatgtctccaaatttaaaacagggatgattattaatattctcaacctttttcatatcatagcacatgtagaaaattatatttatataacttactggttaaatcaaccctgcctggcagccagaaagccagaccctttccagctgtctcagggctgaaaatacccatatcttgacacactagttgggaggctctgtcataaatattacagcaatgagcaccattcagttttaccttaacaaatatttatgtgcctgctatgtgtctggcactgtggtaacccttggggacctatgtgtgaccagagtagaggatctctaccccagtgacactttgagttgggagagtgggttgacccatcaaacaaataattttagatgtataattacaataatttttccaaaggaggtgattgcaagttagtgtagtataattaaggaacagtaaaaagtttgatgagaggctgggcgtggtggctcacacctgtaatcccagtactttgggaggctgaggcgtttgagctcaggagtttgagatgagcctggccaacatggcaaaaccgcgtttctacaaaaaatacaaaaattagctgggcgtggtggtgcacctctgtggttccagctacttgggggactgagatgggaggatctcttgagcccaggaggtgggggttgcagtgagccaagatcgcagcaccacactccagcttaggcaacagagggagaatgtgtctcaaaaaaaaaaaaaagtgtgatgagagattataacacaagaacctgattttgattagtaaggcttctctggaaaagtggactgaagagtgaacggaaattacttaggcaaggggttgaatgtgccatgggatatggagaagagcattctaggaagaaaggaacatttgcatcttcggaggcccccaatgtggacaggagttttgttcttttagggaactaaaagagtgccagtagatgaatgagggggaaggtgatgtgaaatgatgctggagaagtaagcaggtgtgtcagtttattcatgtgtccttatgtcttgatagggtcctgtagaattgccagatcttgataattaatgtcaaattggtttctaggtagattcttcaagtttacactcctagcatcattgtttcttctctctctcaaccttcacctatggtgagcattactgagctttaccaatttaatgctcattttacttgtgtttattgattatcaatgagggttaacatgctgtgaattagtcttttttggtaagttattctttacctatttcagttggggtattctcttttgaatttatttgtaaaagttcttttatttattaaggatattaccttttgtcacagttgttttgttcccttttgttatttgctttttaatttgctgtgtgttccacatattctcctttgctttaaaatgtgtgctatggctatgcatattaaaatgctgatattaaagttagtgtgtgccattctagagtgcacagcaaccagcagaataacaggaggcttggaatgtacttggtgttagacagaaactgatgtaagtgaaaactttatcaagcatataagaaaacctgggcattttatattgtataataagtcttgtgagctgtgtacttttgaggcaataaaatagagccaattaatattatttgaaaatagggagcaatgtacctgtgttttacttgattttaatgtaaaaggtcttctgttttcagtaatgatggactgagttattcagatagaatcttcctgctgaaacagaaaatgttagtatataaaaagtgtatatctgtattttttttacctttttttttgagatggatttttgctatgttgcctaggctggtcttgaatttctgggttcaagtgaccctcctgcctcagcctcctgagtagctgggattacaggtatgtgccactatgcccaactaaaagtatatcttttaaaaaatggcttaagaaaaatgaagagccagcagcatagtggcgaattgctaggttagtgttggtgggagaaagcgagaatccaaagaggtaagcgcagtcttggcaaaccaaaaccacatttgcctttgaattcacagcattatggggtgaggaggattgaaggaaagacctaagactcacccaaggtagattgtcctgtaggtcttgcagtgtaggagacccttcctgtgttaccctggaactccaaagggctacatcctcagggaagagtgaactagaactaacttccctgcccactcttagggactacatggaaggttgtcttggcactgaacggagaaaggtcaaaaggaagataaaaagtttgttccagagaaggtaaagtcaaaaactggctatcatgcagacttacagcccaaatctgtgcatcgagaggagatcagggaaccttaatccctgagcatggtttaatacggttctccactgggaatactgctagacaccttacagcagtaaatttatatcttttctcaaggaaggtatctttttaggtctttggaaattcctacaaattgcttttccagggcagtaagcaccagccaaagataactagctgtagaaggaagtgattccaatggtaatgacacttagaaatttactaatgataaatttttctgtattattctttataaagtgattctaaaaagctacatatatgatactttactgtaaactttgggatctgatactaaatttttcttggctgaatgaaatcaccttggaatcagtgacttcattgttctccattttacacttctttgaataacagtctgagtatgtttcatttgttgtcataacttttgtagtttaagaaagtctcacctcacgatagtgcaataggtagtgttaggatttgctaatgttctctgtgacaaaccattctggaggtgtcagaaaataaataaaatctgagatttcttctctcctatgtggtacccagatattctgttttagaaatttctgggtggagctcataacttaaatgtttattttgtcatggttcgagaggcagtaagcaagatatcagagacactcctctccccaaggctgtgcttgcctagaacaaattgttttgtgtctatatatatccattatttcagtacacataaacttgtcaaatacaatcgtacaaaatacaatacatgggagtcttttttaaaaaacaagagtttatttagtagccaagctttttatatagtttagtgttttgattggtgattgtttttacttaaaatactattcagaggagtttttctttaactggaaaggccagagtcaaaattatatgagatagctacactgtatgaaaagcattctttcctagactagtactttctaaattcagatgaagtatctgaactatcccaggaacttgagacatgcatgcaatccctaatactagctgcttggagagacaccagccagtagcaaccagcttgccttgcttagagaatcttgagggacatttgtctactgataacatatccattttgtgtgtttttcttcaggtgatgcagacagaaagcattgtaaatttaagcctgatcccaatatccctccaaccttcagtgccttcaatgaagattatgttggaagtgggtggtcacgaggacacatggctccagcaggaaataacaaattttcaagtgtaggcatactttgggggagggatgggaatatggggctgatgttatgcatacaacaggaattagaggtttaaaaacctaggagccaaaccttaaaacttgagaatttccatactcttatttttcttcctgacaatatgtctcttctttcaatcacataccgagacatttttaaacaggttgaatgaggaaaactaagtgctatgtgaagggaactagaaagccactgggagctgaagctactcacttttatttatttatttttttgagacggagtctcactcactctgttgcccaggtcggagcacagtggcttgatctcggcgcactgcaacctctgcctcccaggttcaagcaattcctgtgcctcagcctcttgagtggctgggattacaggggtgcgtcaccatgctcagctaatttttgtttgtttgtttatttattttttgagatggagtctctctctgtcacccaggctggagtacaatggcacgatcttggctcactgtaacctccgcctcccgggttcaagtgattctcctgcctcagcctcccgagtagctgggattacaggttcccgccaccacacccaggtgttttgtatttttagtagagatggggtttcaccacgttggccaggctggtctcaaactcctgacctcaggtgatccacctgcctcggcctcccaaagtgctgggattacaggcgtgagccactgtgctcagccactcacttatttttaattagttaattagagacagagtctcgctttgatgcccaggctggagtacagtggtggaatcatagcttactgtagtcttgaactcctaggcttatacggtcctctttcctcagcttcccgactaactaggactatagtcatgtttcatcatgcctggctaatttattttaaaaaatttttttaatttgtagaaatttatagaaaaggtgaaaaaatagtacaacaaacattgatacatttactttacatatacatatgtaaattctgcaaccattgacaaagttgcagacatgttttatttctaaatggattgctcaggagtatgcatcatctaagaatgaggatgtttatatatatgagtatatataaatacaagtatcacaccaagaagtgtatactaatacatttttatatatttgtgcagtaatattatctaaaatacaatgtatagtcagctttcccacatggtcctaattatgacctttatagcttttttgattcagtattcaatcatgaatcacacattacatttagttatcatatttctttagtcttctttaatctagaatgatttccctgccaaaaagtgggaggagtgtctttcatgatattgacaattgttgcgtaaactattggtgattatgtcattaagatagtaattctcaaccttggacactcattataatcacctggagaagtttttgcagtcctgatgcccagacctgaacctcatacttacaaaactggaaactctcagggatgagacccaggcatcaatatcaatatttttaaagctccctagattattccaatgtgcacccaagattgagagcgactgcttgaagagaaggtacttgtagcattggcagttagtatagatcagtgaggaaattacagtgaggtagag

SEQ ID NO: 340 - DNA, 65818 bp, Homo sapiens
catttaagaagaaaaacacttgaaaaagggaatctacttatggcacaaaatagaccacataatcactaaatagaggggctgcaattgggcagtttctaccgatggactcctcaaatccaaattgcctcttccaattacaaaaatagcagatttttatttctgtgaaaatacgattaaatgagaggaatcaggactatcgtctaagctctaaagtctgctctgattatttttcagtgatccaaacctatccagccccctaaaatgccttccagtgaacaaaatggcacaaaacacaaccttcaacaaacttgccatatcccaggagcttctttgtagaataggctggggaagggaggagtgttggaaaagtgctaagggtttaaaacagaagtgctgaggtgtcaaagttaggcatgctgactatctggtgctatcaaaatgcagacctaattattgtgtatatgagtagtgcatgtgtacataaatatgtgtatgtatttcctagctctgtctgttgaagaagacctagaagcagtgatgcctctgtatcaatgagcactacacccagacacaatgcagaccttgatttctttttttttttttaagacggagtctcactctgtcacccaggttggagtgcagtggtgaaatctcggctcactgcaagctccgcctcccggttcacatcattcttctgcctcggcctccagagtagctgggactacaggcgcccgccaccgcgcccgccaccatgcccggctaattttttgtatttttagtagagacggggtttcatcgtgttagctaagatggtctcgatcttctgacctcgtgatctacccacctcagcctcccaaagtgctaggattacaagcgtgagccaccacgcccggcccagaccttcatttctaaacaccgttatcttcagttcattggggaaatggctgaggtttagaaagctgaggtttacaaattatgacaagcttggagtattgtgttttaaccaaaagcatggtggtgcacacctgttgtcccagctactggggaggctgaggcaggagaattgcttgaagccaggaggcagaggctgcagtgaaccgagatcgtgccactgcactccagcctggctacagagtgagactccgcctcaaaaaaaaaaaaaaaaaaaagaagtggtggagcaagatggccacatagagacctccagtgatcatccccctcacaggaacaccaaatagaacaaccatccatgcaaaaaagcaccgtcataaccaaaaatccctgtacctggctttaaaattatatcaaggaaaggggcattgaagaggctgggaaagacaatctcgagttgtcgacaccacccctcgctcttccccatcagtggccatgtggtgcagagggagaatctgtgtgcttgggggagggagtgtgaactgtttgttggactttgcattggaattcagtgctgtctgtcacagcagaaagccacacagggcagaattcacctagtaaccacgagggagcatttagaccagccctagctggaaaagaatcatccatcccagcagccagacagaacttgagttccaactagccccactaccatggggtaaagtgctctggggtcctaaataaacttgaaaggtggtctaggccacaaggactgaaattcctaggcaagtcctagtgctgtgctgagctggagccagtggtctttttgtgcacacaacctgtgagacaccagctggggtggccaagggtgtgcttgtgttacccctcccacgacctcaggcagcacagcttgcagctccaggagagactacttccttctgcctggggagaggagagaggagggtaaagagaactttgtcttgcaacttgcattccagctcagtcacagtagaatagggcaccaggctgaatcctgaggcccccgttccaggccctgtctgctggacaacgtttcttgacacactctagccactgtcttaaagagaagtaccggttcaggcaggattcattaccggatgatccaagagtcctcggacttgaattaacaccaccagttgccaggcagtactcaccacaagacttgagtgagatcccgcgccatgccgacttcaggtgtgacccagcacatttccagctgtggtggtcacagggagagactccttctacttgaggaaaggagaggaaagagtaaaggggctttgtcttgcagcttgggtaccaagtcggccatagtgggatagagcacaaagcaggatcctggggtccctgattccaggccttggcccctgagtggcatttctggacttgctctgagccagaggggagcacagtgcccagtgcatgaaggaagagactgaagcctggcagccttcaccacaagctgactgaagagctcttgggccttgagtgaacatcactggtagccaggcagtgatcactgcaggcctgggattgtggtgactagggggagagactccttctccttgagggaagaagatggaagagtaggaaggacttcatcttgcggtttaggtgccagctcaggcgcagtggaaagagcaccaggtagattcctaacgttcccaagtccaggccctgcccagacagcatttctggacctgccctgggcttagggagagctcaccaccctgaagggagggacacaagcctggctggattcgccacctgttgactaaagagcctttaggccttgagtgaacaacagacggtagccaggcaagacccagtgccgtgctggcttcaggtctgacctagtacagtcccagttgttgaggccacaaggctgcttgtgtcacccagctccaagcagttcagcatggagaaagagactctgtctgggtgaaaataagagaagagagcaagagtctttgcctggtaatccagggaattctcttggatcttacttaagaccaccaaagtgataccttaagagctctgcaagagtcatcattgctgggcttagggttctcctagtgcacatattgttgcagtgaccaaagacttagatcacaacactcgattgcctttgaatacttggaaagccttcccaacaaacaagcccagactgcaaagactgcaataaatacctaactctttaatgcccagacaacaattaatatccataagcatcaaaaccatgctggaaaacatgacctcaccaaatgaactaaataaggcaacagtgacctatcctaaagagagagatatgtgacctttcctacagagaattcaaaatagctgttttgagcttcctcaaaagtcaggataatacaaagaaggaatacaaaaggataatacaaaattcagaaaagtacaaagaaggaattcagagtcctgggccgggcacggtggctcacacctgtaatatcagcactttggaaggccgaggcgggcggatcacctgaggtcgggagttcaagaccagcctgaccaacatggagaaaccccatctctactgaaaatacaaaattcactgggtgtggtggcgcatgcctataatcccagctactcgggaggctgaggcaggagaattgcttgaacccgggaggcggaggttgtggtgagccaagatcgcaccattgcactctagcctgggcaacaagagagaaacgctgtctcaaaaaaaaaaatttgttttttaaataaaattaggaagtacccaaaggatatggagacatatcaaaaagacacatgagccacttgaagtggctcccactgatcaattctgtgacaactcaagcatcaaaataattaattatattagtgaatcataactcactgaataaggatccatgtgttcacactaatattaattaactaattaatttggggaaatgggaaagtactcccttacagcagaatgagaaataataaatgtagaaggagtgataaatttaaaaattacttgttggcaaccatcacaaaaacaattgatttaggtaaaaatctaaaattactggatgaaaatttgatgaaaaacaggatatccacatagttgtgaagtatctccccatgagatactgattaattaattacaaaggacaatatagtaagattacaatgtagaaatctggcagacatcagatttctagccaagtaatcatagttaacattaccaatagtaatggcataaattgatatcatgtacttcctgatatgatgcactaagaagattacaatctcacttctcttgtaatcccggcaacaatacaactgaaatcgcgtcataacataacttcagacaaacccaaatgattgtcctctactctttaaaaatattaagattgtgagggggcacagtgtctcacccctgtcatcccagcactttgagaggccaaggtgggcaaatctcttgaggtcatgagttcaagactagcctggccaacatggtgaaaccctgtctcaactaaaaaaaaaaaaaaaaattaaataggcatggtggtgggcacctgtaatcccagctacttgggaagctgaggcaggagaagttgcagtgagtgagatcacaccactgtactccagccaggacaacagagcaagactccatctcaaatatatatagattgtaagaaaggaggaagaaaaatggaagaactcttctagatctaagaagactaaaaagcagggccatctcatctacagtggagaattagatgccacttgagaaacaatttctaatatactagatgcttggcaccaagtgaccaggcagttacagctgcccatcaccagctatattctgtcatacccaccaagtcatgaggtcaagtgtgcctagcaacaactcatgataagatgataatggatataccctgaagctacgtgatcagaaggtcaaaactccacatcatccatcactgttgtactaatggcattcctaagtgcacatctatagccatatgaccccatatgatcccgtaggaccagcttagagcggaggaaaaagcctgagcttggttcatggatatgaaggtctgtacatgtgtgtaggtaaaaaaaaggatgacagctacaatacagcttattcaaagagcatcttgaaaaacagtggtgagaaaaagtcctccccatgggaagaattttggatggtcatcttccttgtgtggaaaaagaagtggcttatgattagaatatatatgaactcataggtagtggcttgacagagtctgagaggtgagaagaaagatgggtagatcaggtacaaagaggactaggagtagaggcatgtgaatgaataaatggggtgggcacaaagtgtgaagatctttgatgcacatgttaactcccactagcaaggtactacataaccagatagagaaaaagactcagccagttgacagcatctggcctctaacactggccaccccagtgctggcataatggccacatgactgaaatggctatggtaacaaggatggagataattcataggcccaacagcatggtctcctacttatatagattgatctggatgctgccttggttgaatgtccaacctggcaagcaacagagaccagaggccaatgttgagcctccaagatgacactatctcacaagcagatccactggcacataaggtatcaagttgactgcattggacctacttctactgaaggagtacagatccattatgctgggaatcaatacttatttggatatgcatttgtttttcctgcatcactatctgaggacttacggagttcgaatccactgatacaggatcccacataacattgtatcagaccagataacccattttatagtaaaggaggtatgacaataggcccctgaccacaggaccaactgatcacattacctaccaaaccatccagaagctgccagctgatagaaccttgaaatggcctgttgaaagcataatcaaagcaccagctttgagatatgatcctctatgatgaagtatatactttaaatcaaacatcttcattgtctccccagtaggaacaatacatgggtctgggaatcaaggatttgaagcagcagtggccaagttattatctctccccttgactcacttggggacacttatgcttttgttccacatctgaaatctataaatagtttaaaaggccttgtttccaaaagggaaacacttccactaggggcacagcaagtcctattgaactataaactacagatggtgcctggcaactttgggctccttttgccaaggaaccagcaagcaaagatctcaccatcttagaaagggtcattgactctgatcatcaggagcaaatagggctgctgcctcctcagtactccttgatacaattttgattataaaaatcatagaaacatcagaaaggcatagaggcctttcagacccctcaaggatgaaggtctttgtcacaccaccagaagagccactgagaccaacagaagagccagccaaggatgaggagaatacgaaatggatggtggtggaggaagaagatgagtatcagttgcagttcgaaggccaactgcagcatcaggtgttgtagtttatctcactaaccttactctactgagtttcacccaagaaaagaggtctatcagaatcctggaggagctattctcagaaagcatacaaagcagtggatcaagcaaaaaaaaaaaagagtgtattgtcatgggtactgtactgtgccatccaattttcctttaaggactgaagggcaatgaattgagggaagtcacaggtaaacagtaaaaaattgaggctctcttccaatagcccaaagggaattgaatcatgccaacaaccactgagtgagcttggaagtgaatcctcctccacttgacccttcagataagactgcagccctggccaacccctgacattctgtagaaaatcaattgactataatgtgtgagtttatttttgaactgcctattctcttacattggtctatgtgtctgtatttttaccagctgatttgattactatagctttgtagtatattttgaagttagataatgtgatgactgtagctttgttcttttcattcaagatcgctttggctcttcaggggcctttgtagtttcatacaaattgttttttctatttctgtgaaaaatgtcattggaattttgatagggattgcactaaatctgtagatcactttgggtaacatggacattttaacaatattaattcttccaatctatgaacattaatattattccatttatttgtgtctttttaaattcctttcatcaatattttatatttttcagcatacaagtctttcgcctccttggctaaatttcttcctaagtatatttatatatttttgtagctatgtgaatgggagttttcttaatttgtttttcagacggtttgctattagtgtatagaaatgctatgatttttgtatgttaatttcatatcctggaaatttactgaatttgtttattagttccaacatatattttaaatttaaaaacaataaaatgaattatgaagcatttgcaacaaaaggtgggataatacaaaaatattctctcccctttttcagagccaatgcagtgactatgtgtgggcaagagaagacattctaaatgcttactgccctccttccatgtctagagctgttaggtaggataagagaggtctatttttaaactgacatgcaacaaattaaagaaaacaatggttctaaagctttgtgctttgagaggaggaaaccagagcagatggttttttgtttggcaaaaatccctaaatagggcttttggtttacaaaggggaaataccacaacctctcaaactccaccttcaacacacacacacacacacacacacacacacaacacacacacacacacacgcacacacacacacatacacagagtctgaaggaaagaattgaggaagaaaaagtaaaattttgttgttgttgttatttgtttgtttgtttgttttgagacagagtttcgctcttgtcgcccaggctaaagtgcaatggcgccatctcgactcactgcaacctccacctgccaggttcaagcgattctcctgcctcagccacccaagtagctggggctacaggcacctgccaccatgcccagctaattttttgtatttttctagagacggggtttcaccatgttggccaggctggtctcgacctcctgacctcagatgatccacttgccttggcctccaaaagtgctgggattacaggtgtgagccaccacacctgcccataaaattgttttttaaggttaagtaaagggaatttggagcttttgaatgaaagcctagaagggaggggagccactctggtttctgtaaaaggaggaggagcagagaagcatcttggagaaaagatctggtccacatcacacggaatcgggttaagttctgagaaagaggcatgggtggggaaatcctatggagaatgcagattgtggagaagtgatgggtagtacctagtgcagatggcagaggaagtaactccaggacttttgtaaaaacagggactaaagagttggagcagtagctggaagaaagatgtgaagtaacagggcttctttttttaatgggtgatattactgtatatctgtatgctgattgaagtgttccaatagaaaggaaaaaataaacatggataagcattaattagaggagtaaaatccttaagtaggagagagaaaatgggacctagcacataaagagagggtttgtccttagatgttcatccattgtaacctgacagaaggcagattctgtggttgccgatgctggtagaatgatggattcgggagtggaaagattaaaaaaaaatgatcttttgatcttttccattttctcagtgaaataaggagccaagttatcagctaagggtgaggagaaggaaggtggcttgagaaaggttgagaagtgaaatagccactttagagagtaagggagtgaacaaactagagaaatataataggattgtcgggcagagctggaggcccatgtaaagtttgtgtttatgaatttaaaatgggacctattggcatggttgtgagtttctctttttttccagccacgttcagttccttaggtgcaggcataaggaaggcagatggtgccagggatgagtttggccagcaaacactaccaaaggagagaagagcaagggagttgaatatatgcaaaggaacgacgtcaatgatgggtcatggaattgtagtggatacagaaaaaattttttggcactatgtaaacccagcatcaaggatgcaaattcagtcctattgacctggaagtccatgcttacttctgtatggcaatgcttctcaaacttgaggatgcgcaagaactatctggaaactttgtcataaatgcagaactctgggccattcttaacaattctggggcacaacacttgttctttgaaataagcagataggtaatagtaacggaaggagggggtctgtggcccattctatgaaaaatattgtattgcaggtgttttacgtgaaagtgcttgaaagtaggatttgtttgtttgtttgtttgtttgtttatttatttatttattgagatgcagtctcactctatcgcccaggctggaatgcagtggcaccatctcagctcactgcaacctccacctcccagattcaagcaattttcttacctcagtctcccgagtagctgggattacaggcccacatcaccatgcccagctaatttttgtatttttagtacagacagggtttcaccatgttgcccaggctgctctcgaactcctgacctcaggtgatccacctgcttctgcctcccaaagtgctgggattacaggcgtgagccaccgcacccagccgagatcagggttacgcacaggaaaagtgggacacccagacaattgtttatactgccaacttcacagccatagaatgatgacgttccaaatatttgcatttcttaaccaaatgacataactaaaagtaagctaccatgaagctaacactgcaatgggtgcggcaataaattcagtagctttatttttaaatttcaattaggttccttggatgaacaagaaacaagtgtgacattttgtgtggaatctgaaaaccaccttagcatggctttacatcggatgcatcagttttccaaaaagccagagaactgtgttctgttgggggagaaaaagataaacattctaagagaaacaatcatttcttaaatgtggtaaatagctaagccaaaccaaatacattttacgagtatatagaatacatgtgattatgtgaatgaaaccatttagtgtgaggtttaagtgatgggagaaaacattagggaaatgataagaccctcattttctttttctttttctttttcctttttttaagacagagtctcgccctgttgcccaggttggagtgcagtggcacaatctcagctcactgcaacctctacctcccaggttcaagtgattctcctgtctcagcctcccgagtagctgggactacaggcacgtgccaccatgcctggctaatctttgtatttttagtagagactgggtttcaccatgttggccaggctggcctcctgacctcaagtgatccgcccgccttggcctcccaaagtgctgggattacaagtgtgagccactgcgcctggccaagatcctcattttcaagagataaaattaaaggttctatatacagtgaagactgttctataacagtcaagattaaaggggaaaaaacagtatcggccctttacagtactgcatctgtccaaagaccataagggagaagatcctgaagaaatatatcaacaaagctaagacttttttcaattattcttttctcacattttttctactgatttttatttaagcttattgtattttgtcatgttttgtatttaacatctcaccagggctctgctgtcttttgaataatggcaatttattcagtgcatttgtaactatttacaattaaaattatattcctccatgtcatgcatatttctaataatcaaaccaaccccatgaggtgggtatttttaatcagttatcattcccttctctcccactagctggacacttctcagactcctctcttcttagctttgtctgctccctactgtcctctcccacctgctaaaacaagattgtcaatgtttttgaaagatttctaaacctagagccaaggacagcttcagcctctggctggttcttactttctggcatcagagacatttcaaccctaaatctgaaaccttaaaaggttagcagctctaaacgctggccattacacacttctttatctcacacaaacctggtatcattctccttaaaatattttgctctaatggatactttgctctaatggatacttttcaaactctacgaattgcttgagaaaggggaaatgttagatctttagaccaattatcattgccatgagttgttttgtcacttggggtgagttctctataatgtgggaccaagatgaggtagatattttattattcaatatttggttcattattattcaagctcaacttggaattatacaagatggcatcattcacctcagcattcattgaatataaccacaaccctgagttttacagaaaagacttagaaaagaggctgggcgcgtagctcatgcctgtaatcctggcactttgggagactgagacaggtggattgcttgagtccaagggttcaaaaccagccttggcaacatggcataatctcttctctaataaaaatataaaaaatagctggacatggtggtgcgtgcatgtaatctcagctactcagaaggctgaggtgaaagggtcacttgagcccagaaagtagaggctgcaatgagatgtgatcgcaacactgcacttcagcctgggtgacagtgagaccttgtctcaaaaaaaaaaaaaattggaaaggaaaatgcaagtggggacgccatctgcagctcactgcttcatatcattgtttctccctctcacccctctttttaaaaacccagtggccaaattcatctgtgttttgtttgtttttgttttgagacggagtttcgctctgttgcccaggctggagtgcaatggcgcgatctcggctcactgcaacctccacctcccaggttcaagtgatgctcctgcctcagcctcccaagtagctgcgattacaggcacccggcaccacagcaattaatttttgtatttttagtagagacagactttcacctttttggccaggctgctctcaaactcgtgacctcaggtgatccacccgcctcagcctcccaaagtgctgggattacaggcgtgacccaccgcacctggcctcatctggtttttgacaatcattatagaacaaaggctctgattatgatgacgggcaagtgggagtcctagctaaacgttccaatgcagacttacccttgaagcatttggggacttcgatagtgccatctatacactgagcatcctctgtatagctacacttcttttccttatttttgcagaagaaagaaactttatcaccatgtagcattccattcttaaatttttcctgaatctttactctctctccttggtacaccacagtggcttttttcacaggtactttacaagatgctgaaagagagaatacttgtaatcaggacttaagagttcaggaagtctttctgaaagagagtatagcatttgaaacagtagatgagtacacctacacaaattggtcaaggcaagaaaaatccaagaatatatatagtaagtaatggtaatatgattgctaattgcagttctctgtcaatagaaccattattcatagcttccaagatggccttctcttcccctacagtagccacagaaggtcagaacagaagcatcagagcctccatttcagtgaaaaaaaaaaaaaaaagcaactaacagatattgacatttcatgtaagcctactctgccctctcagattgcattcattaagcaggtgcatctatccaccagccattgtgagtgttggctgataacagctcataaatactctgaaaaattgccttcagccatagggaagccacctctcccaggagtttatgcaaaccacccccagggtcagggaagggagcagctcaaagccaaagactgactgatgagggaatataaaaagcaggtccccttggctcttagtgggattaactcaagggtggaattcacactccagagctcccagtgggatcaaactgaacctcattttagcagagaccacatttctccctggctcggcagcattagcatcaccagggaacctggcataaatgcaaattgtcaggccccatcccagatctaccaaatcagaaactctaagagtggagctcaaaaatcctgtgttaaaacaagccttccaggtgttgctgatccacagcgaagtttgagaaccggtgccttaccctcgcaaatctgcctcactctttcttctcctgagacattcactaaatcaactgtactcgaatccccgtctcaggctctgcttctagggaactgtaacctaagatgctagttatttgtcatcttgcctgctgccccagagttcctctttctgcttaaactgtccagcccatagtgacctgagcagagttctaatgctaggctgttgttgttctttacttatgcatgacactgatgggatcaagggtagacacctaactcaaaaggaaccagtgtctccaggaaagatgccagttggtgatgaatcctgtaactgagagggtctggtgtatatcaagccatgttcaagatgaataagcagagagacggaaatgggagagaccattgagatacggaaaaagtaggaatagttcctgcctttcagttccaatcttcaggagtatcagttgtatttcatgtcttcatcttcaatgcccacatgatcgacttgcctgttgcctccttataatatccccaatttccttgaactcactcgaatgtgtggttggtttttgcaatgagaagagccttggctagacagagcacaaaaaggggtgggcatggtggctcacatctgtaatcactcgaacctgggaggtgaaggttgcagggaactgagattctaccattacactccagctaggcaacagagtgagactccatctcaaaaaaaaaaaaaaagactccatgtgtctacaataatactaaaaaatgatggatggaagaaaagctcttctctacagaggccgaggcgggcggatcacctgaggtcaggagttcgaaattagcctggccaacgtggcaaagccccatctctattaaaaatacaaaaattagccaggtgtggtggtggggtgcctgtaatcccagctactcgggaggctgaggtaggagaattgcttgaacccgggaggcagaggtggcagtgagccgagatcacgccattgcactccagcctgggcgacagagcaagactccatctcaaaaaaaaaaaaaaagagtgctcagaggcaaagacttaaaagcaaataaagaaagcccacatgatctcccaccatatcaccaatgcttacaaaggatctgtttatttcatactgtttaaggtcaaggatacttcctaagcatgaggcttccccatgcacctgtgagtcctgaagtcacatgccagcagtttcctagcaagtctgagcaacaagtggaaaagtgttggaacaagaaaatagcaagtaaaggtgatccactgtatcaattcagagatcttacaggacctcgcctatatttccatacctttacaacttggcatggcagaccagtttcccagtttggtacattctatttcttccgggccatccagagaatatccatcatggcagccaaatgtggctttatccttgtaataaagtgttggttttgcaggatagttcacaaatccattgtctggtcttgatgggaatgggcattttacttctaaaacatttattcaataagacatattagtaataaatagtgctatccaatagtcatgaaatagttacatccttgtctctgtcacaccactgaatcactgtgtgttcctgtaactggaatgcaatttatagttaccttgtgcttaattctgtccccactcctcttatatctgtggtaccctggatattaaaaaagaaacaaccacactttgaaagtaaattaatgagacttcactaagttctctgggttttcacatataatcataaggtattatttattgcaaacttcatctctacacagtctaagatggtgggtttgaaagaagaaaagcaaagtctatttctaacaaaccataaaattaaaatgcaaagactgaacccccccccccattcacacttagtacaccattatttggctttaaaatagtaaatcttactgttattcaattcagactatggaagaagccagcaggaaatacgtcaaagaaaaatggtgctgcttcctggcctccttaagatcctcaacagtagaggcccaaacccacgtccttatgagctgcagtgcgagaaagcaaggctggagccaggagcacaatattctcagaggtagtttaaggaggtaattaagggtacaaactccagagtcagactgcttggctcaattttggttctaccacacattaaataaaacagaattcatgtggccaggcacagtggctcacttcggtcatcctggcactttgggaggctgaggtggatgctgaggaggtcagaagttcaagaccagcctggccaacatgacaaaaccccatctctactaacaaaaattagccgggtgtggtggcatgcacctgtaatcccagccactcaggaggctaaggcaggagaatcactcaaacccaggaggtgaagcttgcagtgagctgagattgcaccattatgctccagcctgggcaacagagtgagactccaactcaaaaaaaaaataagaatccatgtgtctataataatactaaaaaatggtggatggagggaaagctcttctctatagagggaagccagtgaataaatgtagaaggaaaagatagaattagaaagtcaccatttttcagcctccaatgtcataattgacagattcaaggatcatcattggattctaccatgactgcccaacagtggatattcacatggtttcaaagtatcacccacaggttgcttactattccaaagaaaaagcagtgcctttaccaaaaggtgatctagcacccctcaactgactaagtatcaaactaagcatggccagtgatggaacagctgacactatgtgcttcctgatatgacagaatgtattttttttttttgacacagagtctcactctgttgcccaggctggagtgcagtggtgcaatcttggctcactgcaacctccccctcctggttcaagcgattctcctgcctcaacctcctgagcagctgagactacaggcgcacgccaccacacccagctaatttttgtatttttagtagagacggggtttcaccatattggccaggctggtcttgaactcctgaccccatgatccacctgcctcggcctcccaaagtgcagaatgtattcttaacagtaatatttaacatgaatctaatcatgagtaaataaccaatcaagttcagattatggaacattctacaagacaactagcctgtactcttcaaaaatgtcaatgaaagacaacaaaagaggcaaggacttattcttaattataggagactaggctcacgcctgtaatcccagcagtttgggaggctgaggcaggcggatcattttagttcgggagtttgagaccagcctggccaacacagtgaaatcccatctctactaaaattataaaaattagctgggcgtggtggcaggtgcctatattcccagctacttgggaggctgaggcaggagaattgctcaaacctgggaggtagatgttgcagtgagccaaaattgcaccactgcactccagcctgggtgacagagtgagacaccatttcaaaataataataataattattattataggagactagagagacatgacaactaaattaaaggtgtgattcttgattagatcctgcataaaacaaaactcatgtataagagatacttctgggtcaattgggaaaatttgcatctgagataaatgttgcatgatatcgttgttgttatgttattagaatggtttggattattattgttaataatccaaaacatatgaagtgatgatataaaatgtccttgttcttagtatattcaggctgaaggctttatgggcaagtatcgtaatatatacaacttattttcagatgatgcaggaaataaaagggatctttctatggagaaacagagagaaaaatgttacaacatattaacagttgatacgtctaggtgaaattgaaaaaaaaaggaacctactttttaggacttgggagaatgaggtcagatgacacatatgtagcaggagaccagtgcctggcccatagttgagtgcccagaaaggtacaagttactactgttattggtagctcctccatgctgaaaatcacttatgttttgaatcgttcactggatatctgtaatatctaccactggagaagttaatagtcacgagaataactcttggccaggagcagtggcttacacctgtaagcccagcactttgagagactgaggcaggcagattacttgaggtcaggcatttcagaccagccagatgatcatggtgaaactccgtctctactaaaaatacaaaaattagccaagtatggtgacgggcacctgtaatcccggctacttgggaggccaaggcatgagaatcgcttgaacccaggtggcagtaagccaaaatcaccccactgcactccagcctgagtgacagagtgagactatctcaaaaaaaagaaaaaaacaaactatttgtgcacatgataaactttataatttgtctgtttgttatgcagctgacaaacttgaagatagtaatgacaggtcaagttagagacgaaataattttcataatttcttaaaaatcaaatatttctgtgattcttaaacttgggtaaagatttttaaaatgtgtaacaatcagacagcaacccagtcttaaccttcatctcctaggactctccaatttaacccaggaacttcacccagaagagaacttcaccagcctcgctgaaatgtccagctgtccatggatacatcctgcctttcatgtctcccccatgtgtggtatgccttctcctcattctctactgctcctccaagacccatttcaaaggtcaccacctatgggaagctgtcccaggcagctccagacagttaattgcattatttataattcccttgggtcagaagccaggtctcattcatcgggaatccacagtgcccagcacactgcctggcacatggtagatgctcaataaacagctgttgaatgagttcattggaaacactccatgatagtcagaattttcaatacctttcacaaatgggatcttgccctaccatgcgtattttgtctgatcattgcacttacccctgcattctggtaatttagtccaatttccatgtgtcgtgcaggtaattgtatcatttccaaacatcgcatgttgtggcaaacattcaaaaactgctgtgtcccgatagagggaattgtttccagctgatggcttataaacacgaagtgttgcaaacgtaggtatggatggtggagggcagatgatggctgggaaaataaagaactatcatttctatgaaaatagttaaggcttttaaatatactctttccagaaagaaaaaaaaaaccctaaggataaacttgagaaaatgcaaactgatcaaattagcagggtaaaaattgtcaattgtggatgcctaataggaaaatatgacctgccgggcacggtggctcacgcctgtaatcccaacactttgggaggctgaggtgggcagatcactagaagtcaggaatttcagaccagcctggtcaacatggtgaaaccccgtctctaccaaaaatacaaaaatgagccaggcatggaggtgtgtgtctgtggtcccagctactccagaggctgaggcaggagaatcgcttgaacctgggaggcggaggttgcagtgagccaaaatcgcaccactgcactccagcctgggcaacagagtgagtctgtctcagaaaagagaaagaaagaaggaaggaaataaataaataaataaataaagacagaaagaaagagagagagagaaagaaaggaaggaaggaaggaaggaaggaagtcagaagggagggagggagggaagaaaggaaggaaagaaagaaagaaaggaaagaaagaaagaggaggggaggggaggggagggagggaggaaggaaggaaggaaggaaggaaggaaggaaggaaggaaggaaggaagccctcaagtcagatgtccaaaccagtcaaaacaccaaaaaaatgaaggaaatttaagtcttgccactgccttttgcaacaacacaatggttaggttttataaaatcttttattcatatactaccttggaagatgcttctggaaggcagaatttgtccctcagtgctgagggaccatcctgaaataatggctggtgacagcaacttggtacatagtagtttgggaatgagttccattaccagttcagtctgtttctgctgaatacctccctgcttttggattcttggtatggatggagcttacccaagtagcttcaggaacccagagagatagtagtggcttgtcaccctgacctgagtactatggagcttcaacaagttatactagcataaaagaagatagtgctgaccaaaatgcgatttaccttgacttccctagatccctgctgctcaaaatgtggtccaggggctagcagcacgggcatagcctgggaaaatagcttgttggaaatgcagaagctcagaccccactgcaggtgcctgaatcagaatctacattttaacaaggtgcccaggagactcatatgtgcattcaagtatgagaaatactcatttaaattagattaaagctcaagcagtctttctatttacaacccttttggaaagtgagtttatggctaggcaccgtggttcacgcctgtaatcccagagccctgagaggctgaggcaggtaaggttgcttgaaaccaagagttcaagaccagtctgggcaacagagcaagaccctgtctccaccaaaatttttaaaaactagccagatctggtggcgctcatctatagtctcagctgctcaggagactgagaggatcacttggccccaggagatcgaagttacagtgagctgtgatcacgccactgcactccggcctgggcaacagagcaagaccctacctctaaataaagaagcaaatttacataatcggtataaatctgttttaagtgaaaactgtaggaaccatcgtgattcctactgctgagtgaaaattttacttaatttgtcctttaaaaactttcgtttttgcttgttcaggtcttcttaaacaattatttatttgaaattgctttactttccacttgctttttttttttttttttttttgagatggagtttcactcttgttgcccaggctggagtgcaatggtgcgatctcagctcactgcaacctccgcctcccgggttcaagtgattctcttgcctcagcctcccaattggctgggattagaggcatgcgccaccatgcccagctgattttatatttttagtagagacggagtttctccatgttggtcaggctggtctcgaactcctgacctcaggtgagccaccctcctcggactcccaaagtgctggcattacaggcgtgaaccactgcacctgccctcctcttgcttttgctaaagacagacttcactgacatgttgaagaactataattagtattgaaatgcctgggcctcctggtcaaagatgtataaatcacaagttggggaacataagaacgtccttccctacataagcaaagcccagagatgactctgacagcttggctgaggatcctctgaaaaaacaacagtgctttttggaggaatgccaatcagctcctaggatgcaagcccctttgatgggctgttggcttactgtgagggtgactttcctcctcgtctgtcccgtaagtcactaggcttactctctgaaggcaaagctgcctcctttggccttgcagcctcagtgctaacaagaggatccagcatacagtagatcctcaattcatgtttattgaataagttaataaatgaatgaatgaattccagagtgggaggaagatgtttgtttgatctcactgtttgcagaagttcctctagttaagtggtgacagtccctgatataccaatgccacacatatccaagccacttccaaagcactatgagagcattggagtcaacacacccagaaatgactggcttagatagagtaatgaccgcgaggtggagaatacagaatgtgtccgtgagtaaaatgcttcccttctgtcattccaaagtggttgtttcatcttctagagcaagataccaggatgaatatcccccacaagggtgaccattcatctcattgagctgtgactgaagagattccagatgtgagactttgagtgctaaaaccagaaaggttctgggcaaaccagctgatcaccttgcccacagacttacgagcacagacaggaagctccgggctccattttccttcctcagtgcacttggcagaatcagcgccattcagataaaacctgcaaaaggaaaattcattctatcaaggagtaaaataatccatcactgacatctcaaatatcttctccattgagcattgcttcatgttaatgctattgacttcttttccatcgtataatgctgtcttcctgacaaacttagtactcatctatggctcatggagcctcccaaccaatgatgcaggtgaatcactgcagggttccacagctggtgagtggagaatccaaacccttaaatccctcatctttaaagagttggccaagatgactgtttctaatataaagcaaagaaccatctctttttcaggatgacaaaagtgaaccaaactgagtaatcttcattattcattttcttacagcctactgacaccaatgaataaaagcaatgcagtctatttccaatgaaaatatagcattctgactgggtactttggctcatgcctgtaatcccagcactttgggaggccgagatgggcggatcacttgagcccaagagtttgagcctgggcaatgtggcaaaggcccaatttctacaaaaagtcaccaggccgtggtagtgtgtgcctatagtccaagctactcgagaggtagaggtggaaggaaggattcaaaaggatttaacctgggaggtcgaggctgcagtgagccatgattgtgccactgcactctagactgagcaacagaggaagatcctgtaaaaaaaaaaaaaaaaaaaaagaaaagaaaagaaggaaaggaaggaaaaagtaaggaaggagagagacagacaaagaaagaaagaaaagaaaagaaagacggaaggaagggagggagggaaagagaaagaaagaaagaaaaagaaagaaagaaagaagaaaggaagagaagggaagggaagggaagggaagggaagggaagggaagggaagggaagggaagggaaaggaaaggaaaggaaaggaaaggaaaggaaaggaaaggaaaggaaaggaaaggaaaggaaaggaaaggaaaggaaaggaaaggaaaggagcaggatgccatggtggctcacacctgtaatcccagcactttgggaggccaaggagggtggatcacaaggtcaggagtccaagaccagcctggccaagatggtgaaaccccatctctactaaaaatacaaaaattatctgggtgtggtggtaggcgcctgtaatcccagctacttgggaagctgaggcaggagaattgcttgaacccaggaggtggaggttgcagtgagccaagatcgcaccactgcactctagcctgggtgacagagcaaaaagaaaggaaaaaaaaaaaaagaaagaaaaatgtaacattatgtcttcgaagccaattttcttaaggtcatttgttaccagacccattggtagattggtgtttcagatgaaaggtgtgtatttctctctcacatgtagtattccttaacctccaatcccagtagaaacttaccctagtggatagccaatgtgctctcaataatgtcacaggggtgcctttgctccttatgagtctatgcccaccgttaagtgactgcctccctttgctcccagatgagcctgtgcccaccacaagtgattgcttcctggggatgtggaactgcattgcattctccactgtcacactcccaaccttctccatagaattctcttctagagactaccaggttggtcaatcaaattagcctaataactaaagcccaagtcttattcctaaagtattttaaccctatccaagatttggcccagagatcatatggaattatcatccaggttcaatcattttaatgtacctcctctgagataattaatcaggagcagaaaaattagatacagtggtgactacgtattgcactagttgttatattctccaatccttaccccaccctcaatgctacaagaccatcctggctaacacagtgaaaccccgtctctactaaaaacacaaaaaattagccgggcgtggtggcgggcgccagtagtcccagctactcaggaggctgaggcaggagaatggtgtgaacccaggaggtggagcttgcagtgagccgagactgcaccactgcgctccagcctgggcgacagagcgagactccgtctcaaaaaaaaaaaaaagcaggactaaaatcgatttgcatttgaaagtccaacctaaaggctgaaaacaaaatatagaccagtcttgatgtttagcttaaggatacaaaaatgtgctcagtctgttaactgcttagttccatgaaagttcttacccagtgttacaagaaaaactgatcgtgttgggatattcaaaagtcgtatagcgtacggctccattttctaagattccagcaaaaggacatactctggctgtgatacaaagataaaaaatgttacttttctttgggctaaaaaaaaacataaacaggtaaatttctatttatagaatttttcattaaatgaaacatataaattcattttcatcctttggttcaataactttactggtaactattctaagaaagcaattcaaaataagacaagtgatatatgtacaaaagcgttcattatactgtttctcctaataacagaatttggacaggcggggagcagtggctcacgcctgtaatcccagcactttgggaggcagaggagggtggatcacttgaggtcaggaatttgagaccagcctgaacatggtgaaaccccatctctactaaaaatacaaaaattagctgggcatgatggtgggtgcctgtagtcccagctactctggatgctgaggcaggagaatagcttgaacccaggaggcagagggtgccaagatggcaccactgcactgggcaatagagtgagactccgtctccaaaaaaaaaaaaaaaattggatagtctaagggttcatcaggggactgttttaattaatcatggtaaatcaaaagttgaactattatgtagccaataaaatatgaattgtgaaatatgtggagatacaatttttatgatatgctgatgaaaacagaaaaatacaaaattatacctgctctctgcagtaatgcaaaaagatatgcatggaaaataaaaaaatgaaatttttagtgttccagagttatagctgatttttattttatttatttatttatttttttttttgagacagagtctcactctgctgcccaggctggagtgcagtggcacaatctcagctcactacaacctctgcctcccaggtgattctcctgcctcagcctcctgagtagctgggactacaggcgcatgccagcatgcccggctaattttttttatttttagtagagacgaggtttcaccatgctggccaggctggtcttgaactcctgacctcaggcgatccacccaccttaggttcccaaagcgctgggattacaggtgtgagccaccgcacctggccctgatttaaagaaaaattttccctaatgatgttacattggctttttactaaaaattatgtttaggctctttaagcaaaaaagcatagtaaaatcaacttgcatgaacatgcataactttgacaaaggtcctgttcatataaccaaaatcaccagatccatacatctatttttactgcttaacttctacatataattaaatgtaccataaattcaatctggttgattgcataatacttgactgtaaagaataatgctagcatgatatcatagaaccatgttctaagaaataaataaaagcaaccatttacagtaaagccatagtgagattgatatattttacgttatattattattttaatttgacctcttttcttgtatttcattataatataatatatacataatgtagatgaaatttgtattcatttcagtaactattaagtccgctttcattttcaggtgaagtccaaagatatgatgattccccaaattttgtttttccaaatgtctctttggcatcagttgacatttcaaagcctctccactgttcttttaacttctgtagtgtttctttctccttttgccacaccagatctcatttttaaacctaccctagtttcaggctatgatcttctcctcttctatcaatagcacctattacccttactctctttgcacagagagaactccccaagaccttctcatttctctccaacctggctttctgcagcatctactggccctctgcactctgagcatgacgaggtagcttattcctccaaaatacccagaatccaaatgagggaagagaatgtgagagaaggtactgacttacgtgtacatttcagagtgttgatgggccacagtcctgtgagagggcagataaactttctcatccctcctcgggacacatagcccggcttgcaggaatacgtaatctcttctcctggctcatagaatgtttttaacgggaccactgtggaaaatggtaaatcatctggcttgggacaggctgaaagagggcacaaagcagatggttaacaaatctctatttgcattttaaagttcagctaagcccacaaatgaaaaatgtgtgtactgttaccaattataagcataccaagttgcatgccaaatacctcatatacactatctcatctaatcccctcaacaaccatttgaaggaggtattataattatccccattttacaggtcagtatgctgaggcttaaattggctacgtatcttacagaggagctttacacatggcaatattaaagaatcagtatcaatccagtccctccagcatccactctaaagagaatttagttatcagctgggcgcagttgctcacacctgtaatcccagcactttgggaggctgaggcgggtggatcacgaggtcaggagatagagaccaacctggctaacacggtgaaaccccgtctctactaaaaatacaaaaaattagccgggtgtggtggcgggcgcctgtggtcccagctactcgggaagctgaagcaggagaatggagtgaacccaggaggcggagcttgcagtgagccgagatcgcaccactgcacttcagcctggcgacagagcgagactctgtctcaaaaaaaaaaaaaaagaatttaattattcttcttcttattattattattgttgactgagttttgctcttgttgcccagactggagtgcaatggggggacctcggctcactgcaacctctgcctcccaggttcaagcaattctcctgcctcagcctcccgagtggctgggattacaggcgcctgccatcacgcccggctaatttttgtgtttttagtaaagacagggtttcactatgttgcccaggctgggctcgaattcctgacctcaactgattcgcccacctcggccatgatgcccagctaatttttgtatttttcataaagacggggtttcaccatgttggccagactggtctcgaactcctgacctcaggtgatccacctgccttggcctcccaaagtgctgagattacagatgtgagcaagcacgcccggcctacttatcattattgatccctgacatatacgaaggggttggatatattaattattttttcaaaagcaaaaagtacttactccgtcctgcaatagcaacatggcagagaaaactcgagaacaagatgagcactggagaaatcattgtggatgagtcacactggcactaccaaagtggttttcgtctgctaaaaagacagagccaaatatgaaagcgcttaaacattaaccattttctggtgtacttttatctttgtaaatagaagataaagtatcatgatttgaatggaactctgagacccacattctttaatcatttactttccacttatgtggctctgttatgaaatctttgggagatggtttctgtcttcataacgtttttgttaatggcacaaaacagttcattattgcttttgacagaaacttgttgtttccggggttgcctggacttctcattctccatcttttgttttgtgtatgttgtagatggaacaccaaaagatcgaagctcctgtttcactcacagccttggcatataaactttggacaaacacctactctctgttctcagtctccacctctctaaaatgatgttccagttttcagatgtataattacaaagaatgtcttccaggaggcacttacaactttaattccctacaaactgagctcaacatcctctcttgcaagctcctatagctccagttaggaccttagagctatccttgaattctctatcttctcttacgtcagatcaatacaaagtcctcctcatccattcttaatatgtcttggatctgtctagacaggtttctagatctgtttcaggaatttgaaaattgatttgaaattaacaacttgggactcgaagaagaaaaaaaaacttgagtaggataagataatgggccagtgctgatgttgttgcttgagagggttcggaaggggggttgtctttgattccctagttctcttctacatcatttgctctaaaaaaaaaaaaaaggatatataaatggacaatagccaggccatatgtgaaaacagaactctgacccacacatctgtagcaacaggtctagaaagccaaacctacaacctctatagcagttggcccaacttaaggccaaccagagaaatccaaacatatttctctaaccaatcacatggacacctcacttctagttagtttccttccatcctccccataccaacaatccgttggagcacacctgaagcctttccttttttctattataaagctttcccactcctctgtctgactttgactttgagtctctgccaaacacaactgttaatggctgcctcccttcctatagcaagctctgaataaataacctccgcttgctctcatttgggtgatcttggtttatatccagaggtctaaaattccctgagacacatcagcttgagaaatctccatctgtcaggcagatgattcttaaattacgatcctaatgaacattgtgttccatgataagaagagtgtgctgccactaatgtgaaataacagtggtccttccctatttgtccttctaaggggaaggagattcttgttctctggataattcccaggttccgctttattgtggagaatctccttgatgaatgaagaagaaagaaaactaatgaagtcaggaggagccaagtcgttctgtatagtaagatctgaagtagaaggggaaaaggagagagaaaccaaagaggtcgggcatcagttaaagaaaatttgagaaaaggttaaaattgagacgagaatattttcagcaacagctacaaactgagtgcctgatattgagagaggacaaggagaagggtttttaatgatgtttcctggtggctgggctcccttgcattaggaaacttggggtaggggtgtcgaaatagtttatattctattttaggtggttgttacttggctacatgcaattttcaaaagccatcaagccaaatatttaagatctgtgtgtttacttgattatacttcaattggaaaactatgcactcctttcctccttcttccctccctcccttcttccttccctccctcccttctccttccttccctcccttctcccctccctttttccctcccttcctccctccctcctttcttcccttccttccttccttcctccctcccttcctctctttctcctttcctcccttcctctcttcctcccttcctccttcttttcatcctaactcagtctaaaagtcacaaggaaggcctcaaggggaaagtcatgcttatctgtgtaaggatggcagcgtgatggtgtcacaagcttagctacatataggagattgagcaaacaagcaaatatattgaggataatgggggtcaggtttctcactaacaagagaagtaacaatgcggaaagaaggaaagttagcatgaaccttgaggtgttggattgaaaatggagacagtacaaattgtgcgtatatataaacagatacagaaatcaatatagatataatggtatgtacatgtgtgtgaatgtatgcctgaatatacatataattcttagttctgtccactaggataatagcagtagtacatccagtagcaatgagcacacacagtgcctaaatattggttgttaaatgcaattcttggccaggccgtggtggctaatgcctgtaatcccagcacttcaggaagaaagaaagatcgcttgaggtcaggagttcaagaccagcctagccaacagggtgaaaccctgtctttacaaaaactacaaaacctagccaggcatgatggcaggtgcctgtaatcccagctacttgggaggctgaggcaagataatcatttgaacccagaaggcaggggttgcagtgagccaatgagattgcaacactgcactccagcctaggcaacagagcgagacactatctaaataaataaataaatgcaatccaccatcgaaaggcaccaaagctccttagaaaattggctgattcttgaactgggtcaaggaaaagtacaagatgagcctggaacaccatcttgaacaacttaggtaatgctcagagaatgatagggacatgtccaaaggacagagaagccatttgaaagtggctttcttgactgggtgcggtggctcacgcctgtaatcccagcagttcaggaggccgaggtgggtggatcacttgaggtcaggagtttgagaccagcctggccaacatggtgaaatcccgtctctactaaaaatacaaaaattagcagggcatggtggcgtgtacctgttatgccagctaggaggctgaggcaggggaatcacctgaacccgggaggcagaggttgcagtgagccaagatcgtgacactgcactccagcctgggcgacagagtgagattccatctcaaaaaaaaaaaaaaaaaaaaaaaaaaaaaaaaagcggggggcggggggtgctttctctggtcaaatatgtgacagtttgtccaaataagtaataatagtaatggattatactccactgaataaaataggaatcagtgagtccacagtgatagtaataaacacattaacaattatgtgaagagataagaaagttattccttagagtataatgccaagcaattaatatagaggaatactggacttagagaattgtaatttggaaataattatgaaacgatttaattctggcaaagaagtatcaattgatgctagaatcaggggatacaagtaggatgagaaatgttcatacagccttaaacatgtctccacataaaataactatttattataaaggagacaaagagaaacttagaggggaagaacctggcagacaccatcttaattaagtaatcaaaattaatgtcaccactaatgggataaattggcatgtatgtcctccaccaagaggatgcaatgagaaggacacagcgtcacttctgtgatattcctgccaaaagcttagtaacctggattgtgtcatgagaaggcactgtacacacacaaattgaaggacgttatgcaaaatgactgccctgtcatcttcaaaagggcaaaagccatgaaaggcaaagaaagacttagggaacccaggtggacatgagaactgggtgcacagtgtgggcccgaaggggcatttggtgacacttgaatggaagggtctagggtctctgggtaaagagaacaaggaagtttttgttctattcttacaacttttctgtatgtttgtaatttgaaatcatttaaaaaataacgaaaaagaaaaagaagaaagaaagagagagaaagaaagaaggaaagaaggagagagagagcacaagaaagaaaaagaaagaaggaaggaaggggaaggaaggaaggaaggaagaaaagaaggaaggaaggaaggacgctttttgtggtttccttgaaagtccttctattgagatgtgatttttaaactggatcatacgaggcctcaaattttatttgcatcgccccctaaagaggaatacaagcttggcccccaccccaccgccatcattgacactcagctcctatttgccagctactgagctttgaaaaattatgcaaaataacagtgacaggaaaatggagaaaccactaaatcaaacttagtttgacggcttttgtgggctgttacatgcatttgtaattacaactttcatgtttactcttcggctggtaaaaatttcccttgtttgaacaattaaatacaaagataataaatggtaatctgcataattaataaattatgagtataattatgattaatttattcataatcataattttgggattatgatgattatcagctggccaccatgctcagctaatttttgtatttttagtagagccagagtttcgccatgttggccaggctggtctcgaactcttggactgaagtgatccgcctgcctcagcttcccaaagtgctgagattacaggtgtgagccattacctccggctgaacttgaacatgtctgagaactacagggtattcctggccgggcgcggtggctcacgcctgtaatcccagcactttgggaggccgaggcgggcggatcacgaggtcaggagatcgagaccacggtgaaaccccgtctctactaaaaatacaaaaaaaaagttagccgggcgtagtggcgggcgcctgtagtcccagccactcaggaggctgaggcaggagaacggcgtgaacccgggaggcggagcttgcagtgagccaagattgcgccactacactctagcctgggtgacagagcgagactccatctccaaaaaaaaaaaaaaaaaaaaagagagagaactacaaggtattcctaaaactcttccagaaacacacatggccctaatgaagaagtctttggagagataagatgcaattgcacctttcaattattttcaccttccagtttgtgacacattgggccacataactttagcaccatctggttgatcagttaactgatctatcttccctccacgcacttcgattcacattcccaaaactaacctatgataataactgaggagctggctgcttaccaatgttaaatgacagttttaaagacacatttaaacttaccattgaagttttatttggcagagcaagtggaaaaactgttaaaaaatatggaattttggcaaatcaagtggctgtcttgtattttcagggtttatactcatcagtaaagattggcaactcttgggtttaatgttacacttaacatgctattaatatattttaacaggccgggtatggtggctcacacctgtaatcccagcactttgggaggatgaggcaggtggatcacttgaggccaggagttcgagaccagcctggccaacatggtgaaaccccatctctactaaaaatacaaaaaagtagccgggtgtagtggcgggcgcctgtaatcccagctacttgggaagctaagacaggagaatcatttgaacccaggaggcagaggttgcagtgagctgagatcactcattgcactccagcctgggcaacaagagtgaaactccatctgaaaatatatatataatatatatgtatatataatatatataatatataaaatatacgtatatatatatacaagcatgatcaagaatacctgagaatttaagaatatataaaataacaacatttttatcacaagtaacatgggacctcgtcttttgaaactgttaatgactttatagcgtttcttacgctaatttgtaaattaaactatagagacctggattcagagtccaaggtttttgtattcctgaaaccacattgcatcacatgttcaaaaactttcttatttacttcccaagcagagactttgaccatgatattaaacatttagcaacagtttagattatttgtttaaaaacctactttcaatgttgtctccttctgagttggaattctagtcaatatctaccaaccacatttcagagaaaagattcaaatgccttctctttatgataaaatatgtcaggaactagatatgcatttataaggggtataaacatgtcacagggcttaatgggcatgattaaatatgtctagaaatcaataatgggcctaagtcagcactgggacatttttgtgtggacactgggatcctctgaatacaggtagcttttaccttgaaaaaactaatatccatatgttgcaatttctatttttatctagagtagttagtcttatccttggctgcatagtagatgttcccaattgtttgttaaaaataccaatactcataatttctgggtatagtgctttttttttttttttttttttttgagacggagtctcgctctgtcacccaggctggagtgcagtggcgcgatctctgctcactgcaggctccgcccctgggtttacgccattctccagcctcagcctcccgagtagctgagactacaggcgcccgccaccgcgcccggctaattttttgtatttttagtagagacggggtttcaccgtgttagccaagatggtctcgatctcctgacctcatgatccacccgccttggcctcccaaagtgctgggattacaggcgtgagccaccgcggccggccggtatagtgatttttaaaacaattgtccaggtaagtatgattgaagtaaggataaagatccactgatctagcacgtcaatgttcacctaagacaagttcagctaatacggttctaccacatacattttctcccttgccaagtgagactattttctgtactttgaatatgacacagctctgagtctcttgtgcattttctcctaagtgccattaatgcttttatttatttatttatttgggtgttttttgtttgtttgtttgtttttgacagtgtctcactctgtcacccaggttggagtgcagtggcgtgatcacaagtcattgcaccaccatgtctggctaattttttgtatttttggtagagacagcgttttgccatattgtccaggctggtctcgaactcctggcctcaagtcatctgcccacctctgcctcccgaagtgctgggattacaagcgtgagccaccacgcccagccttatttcttatttctttattttttgtagagatgggggtctccctatgttgcccaggctggtcataaactcctgatctcaagtgatctgcctgcctcagcctcccaaagtgctgggattacaagcatgagccaccgtgcccaggctttcttttttattttattttatttttttacaaactgctactaagcccttactaagctgtaatttgtggttgatagcagaatttcagaaataaacaagagttgactactggctataaggagttcgcagtttactaagactgaggtacaatgctacaattacaatcatagaagaaagtgtcagatgcatgtgtatccccgcacataaggatgtagtggcaatgatgaggatgttccaggttgttgccaaagagcaaaggcataaaacagcatcatgcacccaacagttgcaaattgttgagtgttgctggtgcagaatatttcaggtaaggaatagcagcaaacaaaggtggagagtgggtaggaactagatgataaaggctcttttgttttttttgtttgttttttgttttgttttgttttgttttgagacagtgtctcactctgttgcccaggctagaatgcagtggtgtgatcttggctcactgcaacctctgccttctgggttcaagcaattctcctgccttagcctcctgagtagctgggactacaggcatgccagcacacctggctaatttttgtatttttgtagagacagggtttcaccatgttggccaagctggtctcaaacttctgacctcaagtgatctgcctgccttggcctcccaaagtgctgggattacaggcatgagccaccatacccagccccaaaagtcacacagatattaaccagaaagtactcattctctaagccaggaatcgaacacgggccaccactgtgaaaggagagaaccttagctacggagctacaacactgggcctaatttttgtatttttagtagagacggggttttgccatcttggccaggctggtctcgaactcctggcctcaagtgatccacctgccttggcctcccaaagagctgggattacaagcatgagccaccgcacccagctggcaaaggctcttgtaagccacgtttaggaattagaacttatcttgaaggcggtgaaggggaggaaccggatcaggtttgtattttcgaaagtatatcgatagcagtgtagaagacacactgggatcagagagtagtgcagggagaaagagagactggaagaagaaaaaccgtagtatgttgccacataaactcatcttccattcattccactctccaaaccaatggcatcttctgtggtgttcatctgtgagatgaacaatatgaaactggccattctgatgaaccagaacatgtgctgctcttgtgaagcatacattagaaggaaggaatttccttccccttttccccgaaatcaaggcctgaaatgccagaggaacggagtcctagctaggggccaaagtctttacttagaaactggcaggaattttgctaggcaaattcaccaacccatatgttacgtgttagattggatttggagaaaggtgcttagatataattgtgatattgagtctgtggaggatggtgtgcaccaaatagaaaaaggagcatagtctctggctcttcatagagtgaccccatcagagaatgggggcaagttcatcactgtggcaagaccatggtgtcatggctaaggacagaggttttaatcaccgtatacttgagttggagtcctggctctgcctcttagtagctgtgtcatcttgggcaagtaacattctctagtcaagttttcatgtctaaaatggagataataaataaaacccccagccaggtgcaggtggctcatgcctgtcatcttggcactttgggagaccaacaggggtggctcacgaggtcaagagatggagaccatcctggccaacatggtgaaaccccatctctactaaaaatacaaaaattagttggacatggtggcacacacctgtagtttcagctactcaggaggttgaggcaggagaatcgtttgaacccaggaggcggaggttgcagtgagctgagattgcgccactgcactccagcctgacaacagagcaagactctgtctcaaaaaataaataataaataaataaacaaatcccccttcaaatgggtgtagtcaggattcaattagaatgcaggcaggatacttaactgtagctttattcataatggtgaaagtaagcaccaaaatatcccaaagcaaagaaatggttaaaatagagagcatctccaagatgtaagattatgtagtcattaaagaaaaaaaagcaatctttgaaaacacaaataatgatctgggaaattgcttatggcatgaaaataaaatacataattatatactgaatatggttccaattttgattatgacatatacaaatgctgaaagaaataaccctaagtggtgatattataatgagtgtttaatgaaagttagttctcattaacattcttcttgtcattaatatacatgcctctgatgtcttactccaaagaatttgaaattcctacacaaaatcacacaaaggtaggcatgtggttcatgcaggttaaatgagcgtcccataatgatactgcttacccggttttagtccccatgagtagcaaaattgtaagtctccccaacttatcttggtatagaaaataatatagatgtttctgcgacattcagtagggtcattatgtcacccaactctcagccaatgaccaccacaaattgcagccagtccctccagagtcagctgttcagctggctggatcatctcagccctctgtccagtcccagtgtgagagtctggtatcagccccccagctcacttcattttcctgcttcacaagaagttctgagttaggacaagtttgagacaaaaaggccatgatgctttggaatacaaagaagagaacactgaggccgggcatgggggctcacacctgtaatcccagcattttgggaggtcgaggcgggcagatcccatgaggtcaggagatggagaccagcctggccaacaaggtgaaactctgtctcaactaaaaatacaaaaactagctgggcatgatggtgcgcacctgtagtcctagctactcaggagactgaagcaggagaatcacttgaacctgggaggtggaggttgcagtgagctgagatcgcaccactacattccagcctgggtgacagagtgagactccatctcgaaagaaagaagaagagaacattgagacctttcacacaagtgtcacggactatttagaaaaacatattgtgagaattagaaagaaattatggggatgatctcatcaccagaaaacctaaaagggaatgaggtttaacagatgagagcttgataataagattctggaaatgcatttgctgacgatctggtgcagaagatgaggaggcagccagagaaactaatatgacttcccaggaagtttttctgatgagctcaggttgggaaagaaaaaaaaaggatggaggaaggggaatattacatgggatgaattcgaagtacagcatagaggccgggcacggtggctcatgcctgtaatcccagcactttgggaggccgaggcaggtggatcacatgagaccaggagttcgaaacaagcctggtcaacatgaagaaaccccgtctctactaaaaataaaaaaaaattagccaggcatggtggtgcacgtctgtaatcccagctactcaggaggctgaggcacgagaatcgcttgagcccaggaagtggaggttgcaatgagcagcaatagtgccattgcactctagcctaggtgacagagtaagactctgtctcaaaaaaaattaaaaaaaaaaaaacgaagtacagtataaaccaagtccataaaatgtcaggagctcagctgactaaactaaatccaagatgtgataaagatcagaaaaaatgcaaagacaataaagtgtagaagtcaggatggaaagaggaaggaagagttattgtatttcacaaggaagatgattcgtacatatggaattatacttttctcattatgagagtaatacagtatcatttaaatcaatctggaaaacaaacaggaaatgactaaaaatcctataatatcaccatttagggttatttcttttcagcatttgtatatgtcataatcagaattggaatcatattcggtatattgttgtatattttattttcatatcatgagcactttcccagattattatttgtgtcttcaaagcttgcttttttctttaatgtctacacaatcttacatcatgtagatgctctctattttgaccatttctttactttgggatatttgggtgctatctttcaccattatgaataaaggtacagttaagattctttttttttttaagtgaaagtaagtttattaggaaagtaaaggagtaaaagaatggcttccccataggcagagcaaccaagattcttttacaaattttttttcattgaaacagagtcttgctctgtcacccaggctggagtgcagatgcaatggtgctatcttattcactgcaacttccgcctcctgggttcaagctgttctcctgtctcagcctcccaagtaactgggattacaggtgcccaccacccatacctggctaattttttgtatttttacaaaagcagggtttcaccatgttggccagactggtctcggattcctggcctcaagtgatccgcccacgtcagcctcccaaagtgctgggattataggcataagccacctcactcggcccttttataaaatttttgaataaattgtttccttaggatagagtcctagatgtggaattacttaagcaaagggtaaaacatttaagaatcttcaaacatactgcctagttgccttcctgaaaggttagcccaatttttgttccgatttacaaggatgaagtttctaaacctaaggttgaaagctgacaaagagagagaccgattatttaattgttagttttcttctgacttattggtagagtttgaatatttgtgcccccaaatctcatgctgaagtgtaattcccagggttgaaggtgtgacctggtgagaggtgaatggattatgggcagatttctcaggaatggagtagcaccatttccttggcacgtgtgagttgagtcctcatgagatctggttgtttaagtgtgtggcacctcctcccagctccttctcttgctccctgctccctcttcaccttctaccatgaataaaatttcctggaggcctctccagaagcccagcaaatgctggctgtgtaaacagcctgcagaaccataagccaattaaaactgttttctctgtaaattttctagtctcagatatttcttcacagcaacccaagaacagactaaaacacctatatagcaaaaaaaaaaaaaaaaaagaaagaaagaaagaaattacactcacactgaaaaataaaaatgtatatcaggaagatggaataaaagtccagctagaaaataatacaagaaactagctgtccaaaatgaatttaggggctagaaacccaggaaaacatattccaagttgttaaaacgtgtaattgtgaccctgggaagttcactatcaacaatatttacaatataggatggtaaggaggacaatctaataaaatgaaaattgtattttaaaattcatgtacaattggctgggtgaggtggctcatgcctgtaatctcagacctttgggaggctgaggctgacagatcatttgagctcaagagtttgaaaccatcccgggcaacatagtgaaaccccatctctaccaaaaatacaaaaattagccacgcatggtggcacacgcttgtagtcctagctactcaggaggctgaggcaggaggatcacttgaactcagaggcagaggttgcagtcagctgagatcacacaactgcactccagcctgggcaacagagctaaaacctgtctcaattaaaaaaaatacatgtacaacactgtgatactgttaagaatatatacccacatacacaaacctgcacattctgcacatgtaccctggaacttaacataaagattttcttttttttgagatggggtctctctctctgttgccaggctggagtgcagtggtgcaatctcggctcactgcaacctcagcctctccagttcaagagattctcctgcctcagcctcccaagtagctgggactacaggtgtgtgccaccacacccagctaatttttgtatttttagtagagatggggtttcaccatgttggccagatggtctccatctcttgaccttgtgatccgctcaactcagcctcccaaagtgctgggattacaggcgtgagccaccatgcccggcctaaaaatttttttaaaaagaatatatctagaaaaaatgctggaagttagtgtaccaaaatattgagtatttgagttagaaggagatttttttttcttgttttctctgcttccaaattttatgtaatgtgtttgtattatttcatgatgggagaaaaaaacattttcaaaaacgatgaacacaaagatgcctgaagacacagaaggaaaagcaatagattctgacagccaagcctcagtaagtttgacataaatccacagcccaatggtatgaattgttaaacaaatggtttatgggtatgtagatgaatgtgaaatgatgactgaaaaataatatgaactctcttcaaaacatttgaaggtttcaacaaattaaatccaattatgttttttgacattgttattaggttagtagaaaagggcaacactttagctacaatgtatatccctcttttagtaaagcatttgatgagttatctactggcatccttgggagtaagataccgaactgtggcttgggatatggtacttctaagtgatttgacagctgcttgtacaaactgtatatgaaaagttctgctcaatagctataacatgaaacacccaaactccacagaggtttattagctgccataggtctagattatatgaaagtaaaatgaggacttggggaatgattcattattttttaagagagtagaggcatgaatgtctcccacaaatatcatctattgctttttgttttaagcttaaatctttttttttttttttttttcagatggagtcttgctctgtcgcccaggctggagtgcagtgacacgatctcagctcactgcaaacctccgcctcccagattaaagcaattctcctacctcagcctcctgagtagctgggattacaggcatgccctaccacacctggctaatttttgtatttttagtagagatggggtttcaccatgttggtcaggctggtctcaaactcctgaccttgtgatccacccacctcggcctcccaaagttctgggattacaggtgtgagccactgcgcccggccttaagcttaaatctttatatatatttatttatatttatttttgaaacagggtctcactctgtcacccaggctagaatacagtgggatgatctccactctctgtatcttcaacttcccaaactcaagtgatcctcagcctctcaagtagctgggactacaggtgtaagtcaccacacccaactaattttgggttttgttttgttttcttttgttttttggtagaaactgcgttttgccatgttgcccaggctggtcttgaactcctggcctcaagcaatctgccggcctcagcctcccaaagtgctgagattacaggcttgagccaccccacctggcctaaatctttaagtttaaagtgagtatgaacacccaccgatgttgattcatactggcctcttcgagaggaccatggatcttaagaagcagtcttatgatattgtgaaagtaaaatatcttcagcccccaaaatcactaaggaaacctcaagctggaaactgcttagggcaaacttgccccccattctattcaaagtcacccctctgctcactgagatagatgcatatctgattgcctcctttggaaaaactaatcagaaactcaaaagaatgtaacttctctgctttgagtcttcctgcctttgcttcaagttgtcccgcctttccagaccgaaccaatgtacttcttacataaagcaattaatgtctcatgtctccctaaaatgtataaagccaggctgtgccccgaccaccttgggcgcatgtcgtcaggacttcctgaggctgtgtcacgggcgcaggcacatcctcaaccttggcaaaataaactttctaaattaactgagacctgcctcagattttctgggttcacaatgtctggatatgtgaacaagcaaaaatacgtcaaggagcttgacagatgactgcccttgtctcctagatcaaaggaaattcaacttattatttaacctgtcaagaatatctgtgctttcccctttgtttctatgtgttctctcattaattttcttcaccatggcatgtccccttcatctactggctctgtttgaaaaccttcacttttgtctgtctgccaatatcccacagctaaggaacctcacactacatacacacaaatatactcctctaccccccagttcattattttaaaagctgacagttaagaaaaaatttcaggccaggcacactggctcacgcctgtaatcccagcactttgggaggccgaggtggggggatcacctgaggtcaggagtttgagaccagcctgcccaacatggtgaaatcctgtttctactaaaaatacaaaaattagcccggtatggtggtgggcacctataatcccagctactcgggaggctgaggcaggagaattgcttgaacctgggaggcagaggttgcagtgagcagagattgcgccactgcattccagcctgggcaacagagcaagactccatcttggaaaagaaaacgaagaagaaaaaatttcaagaataagacaataggctggatgcagcagctcacacctgtaatcccagcactttgggaggccgaggcaggcggatcacctgaggtcaggagttcaagaccagcctggccaacattatgaaaccccatctctcctaaaaatacaaaaaattaactgagtgtagtggcgcatgcctgtaatgccagctacttaggaggccgaggcataagaatctcttgaacctgaaaggtggaggttgcagtgagctaagatcacaccactgcacgctagcctggacaacagagtgagactgtgtaaaaaaaaaaacaagactatagaattatttccacagtcctattctgttcaatatcttcaacaaattggataaagaataaaaacaagagccaggcgtggtggttcatgcctgtaatcccaggactttgggaggccaaggtgggtggatcacgaggtcaggagttcaagaccagcctggccaagacggtgaaaccctgcctctactaaaactacaaaaattagctgggcgtggtggtaggcacctgtaatcccagctattcgggaggctgaggcagagaattgcttgaacctgggaggcagaggttgcagtgagccaagatggcgccattgcactccagcctaggtgacagagcaggactccatctcaaaaaaaaaaaaaaaaagtataagaacaaaactacaaattttcagatgttacgcaactgagagaacgcagagagagttgatctcaaaaaccttaccacttcagccggaaaccacaggatacatttcacaagatcactgcaaatctcagcatgcaggtgaagtggaggaggaagcagcatgagcttgaagaagttccagatgtttccatcaaccacaagtttagcctgacctgctagtgacacagctgaagtgtaattgaattaggctgtgttcagacacagaaaactccagtcttgaacacaattactgctttgcactgtgttggtcagaccaaagtttggcagttcttcaggagcatactgaaaagccagacctctctgaaggacaatgaaaactctgaaagtcatgtaacaggataataagtcaaagtatcatgaaagcctaccctggagaagactaagaaagtctccaaatatttcaaaaaccattatgtggaaggagttttaaacttgttttcagtggattctgagcacagactttgggttaatgggtaccagttttagagaagaaagaaagattcaatgtgtgaaaaaatggatttttttctttttcttttttttttcgagacagggtctcactttgtcctccaggctggagtacagtggcacaatctcagttcactgcagcctcgacttctggggttcaaacgatcctcctgcctcagcccccaccccaagtagttgggactataggtgcttgccaccacgcctggctaatttttgtatttttttgtaaagacggatttcaccatgttgcccaggctgatcttgaacttctgagctcaagtaatctgcctgtctcggccttccaaagtgctgggattacaggtgtgagccacggcgcctgccctaatgtttaataattaaagactttcagcaatgaagtgggtttcttcaaaaagtgatgtgcatcctgtcaatcataacatcaagttctaggccctggaagttcaactgagtgatcatcctaaaataacatattgggtcactcttctgcttagatgctccatggcttcacattaaaattagaacaaaggccaggcatggtggcccacgcctgtaatcccaacactttgggaggccaaggcaggcagatcacgaagtcaggagatcgagaccatcctggctaacatggtgaaaccccgtctctactaaaaaaaatacaaaaaattagctgtgcgtggtggtaagcgcctgtagtcccagctgctcaggaggctgaggcaagagaatggtgtgaacctgggaggcggagcttgcagtgagccgagatcacgccattgcaccccagcctgggcgacagagtgagactctgtctccaaaaaaaaaaaaaaaaaaaaattagaacaaaatgcaaactccccatcctggtctactaggccctgtgtgatctggctctgctgacctgtatcagcagctttctcccttttcctacttttcatccaagtattcatttactccaggactgttcttcaaggtcagccatgtgctggcacagttgtgaacacagcaggcaaaatctctaccctgaagttgctgacatcatagtgggagaagaaagacaaaaataaataaataataaacaaatagatgaagggttaaggtaagtgctatgtagaaaaatgagcagggcaggccaggcgcgatggctcacacctgtcatcctagcactttaggaggctgaggctgaggctgatggaccacttgagctcaggagttcaagactagcctgggcaacatggcaaaaccccgtctctataaaaaatacaaaaattagctgggtgtggtggcaggtcacggttctcctgtccagctcactgcccctggaccactccatgtagaagtcctcaataaaccctatgtctcgctcactggctctgggtctctttttcagcctctcagacatggtgccatccttattatggccaataaatgtcccacacaacacatgcctctcaagggctgactctgtctttactggctgcatccccagcacgtagaccagtgcctgacacagtcagtgctccagaaatagctattaactgactgataagggaagcaatgagggaagtaatgtcgttgctcagagccatttccctggcaacacttgccaactggaagttcacttccgctaataaaattctctttggaaaatacagatacagcctgggcaacatggcaaacctccatctccacgaaaaaactgcaaaagaaaaaaattagccaggcatgatggcatgcacctgtggtcccaactaaccaggaggctgaggtgagagaatggcatgatcccagttcaaggatgcagtgagctgtgatagtgccaccatactccagcctgggtgacagagcaagaccctaccttaaaaaaaaaaaaggccaggtgtagtggctcatgcctgtaatcccagcactttgggaggctgaggcaggtggatcacaagatcaagagtccaagaccagcctggccaagatggtaaaaccccatctctactaaaaatacaaaaattagctgggtgtggtggtggacgccggtaatcccagctactcgggaggctgagggaggctgaggcaggagaatcagcttgaaaccgggaggcagaggttgcagtgagcagagatcatgccactgcactccagcctgggcaaaagagtaagactccgtctcaaaaaaaaaaaaagaaagaaagaaaaaaagaaaatacaaatataaatatgtcctggaaaagttaagcctcattcatattgtaatatgaatgaactaatttaatcagatgacctacatatagcagatagagtagcattcaaaaggtaagcattttggttgaaacagaagggattttttttttttttttttttttttttttttttgcagaatcttgctctgtcgcccaggctggagggcagtggcgcgatctctgctcactgcaacctccaattcctggttcaagcaattctcctgcctcagcctctcgagtagctgggattacaggcacacgccaccacgcccagctaacttttgtatttttagtagagatagggtttcaccatgttggccgggatggtctcaatctcctgactttgtgatctgcctgcctccgcctcccaaagtgctgggattacaggtgtgagccaccgtgcctggccgggatatctttttatttttttgagatggagtcttgctcttgtcacccaggctgaagtgcagtggcgcaatctctgctcactgcaacctccaattcctggttcaagcaattctcctgcctcagcctcccgagtagctggaattacaggtcaactgatccgcctgcctcagcctcccaaagtgctgggattacaagcacaagccaccgcacctggcccaggaggaataccttgaagggagttctaggcctcagtgaagctggaacaaaagagtcaaagtatggaaggagagccagtgtggtggcccaaagagagagagggcagaactggaaaagatttagaaaaggtgactgataggtctcaggacacaccacccccaaatatgactgcaggagaccagaatatgctaccccaaaatatgtctcttttatgtatgggttatttcgagctggttattttgagaaactgcagacacaggagtatttcagaaaagtcgcccttttgtaaggaaatttacatctataaagaaaatcactagaaactcctaaaggatggagaaggcctggacttaactctgcataacaaacctgacccttggccaggagcagtggtggctcacgcctgtactcccagcactttgggaggccaaggcgggtggatcacctgaggtcaggggttcaggaccagcctggccaacatggtgaaaccctgtctctactaagaatacaaaaattagcctggtgctgtggcgcatccttgtaatcccagctactcggaaagctgaggcaagagaatcccttgaacccaggaggcggagcttgcagtgagccaagatcccgccattgcactccagcctgggcgacagagtgagactccatctcaaaaaaacaaaacaaaacaacaaaactgacccttgcttttcagtgctttttctggccatcttgaaagactgtggggtctttccccacacctttctttctttgtttaataaaaagggcagcatttaaacctgaagattaaacttttccttggagatctactctggaggtttatgcatttctccacggttttcttccatgcgtacatgaggtatacacgctaataaacttttgtttgtttttctcttgttaatctgctcagggagtcccagttaagaactatggagggtagaaagaaaattatttttcttcccctacataaccaaagttaatcttgtcatcttatcacatctcttgaggccccagcagcagctgcttgcaaagcctcagttaaaagataagattgccactgaatagtgtttcttaacctttctcaaagtcatttttcaaaataagccaatgcagtttattatttactgcttgtcttcagctagtagcaagatagagcttcatgtggctgtaaatgggggaagaaattactataactcctgaccctccttttcttccacacgtagatgttagtccctgagatgtatttatcaaaatcagcatgataaatataaaaatctcagctaggcatggtggctcacgcctgtaatcctagcactttgggaggccgaggcaggtggctcacttgaggccaggagttcgagaccagcctggccaacatgacaaaacccagtctctactaaaaagtacaaaaaattacccaggcatggtggcacatgcctgtaatcccagctacttaggaggctgaggcatgagaatcacttgaacccaggaggtggaggtggtagtgagctgagattgtgccactgcactccggcctgggcgacagagtgagattgtctcaaaaaaaaaaaaaaatcttatgccctcatttcatgttatttgaacaaaagaccatggctaacactagatcacagcaatggacataagagaaaaattttttgtcttgaattttacgtatttaacatttgggccatatagtagtgtgaattgtctatttctatttacatgacctaaatcagtcaatagactgtgatctgcatcagccaactggaactcagcaagtgttgaccaatcagaactacataaatttgcatccttcatttgcataagcagaccagagtgggaacctgggagggaactttctctataaaagataacttctctctttattctctcagaatgcacctttgttttgtaccaaagactgcatctccctggtttacaaactgtttactgggatgaattctcttttttttctttaaaaaatatatttttcagtgaatttgttggtaatagtcatgacaatctagaactacagcaggacactagtttttaaaagttatttgaactttttaacatgtgttaggcaatactgatgaaacatctctatctatagagatgtattaaagttctggccgggtgttgtggctcatacctgtaatctcagcactttgggagtctgagtcaggtggatcacctgaggtcaggagttcgagaccagtctggccaacatggtgaaaccccacctttactaaacctacaaaaattagctgggcatggtggcaggcacctgtaacctcagatatgtgggacgctgaggcaggagaatcgcttgaacccgggaggcggaggttgcaatgagctgagatcatgccattgcactccagcctggacaacaagagtgaaactctgtaaaagacaaacacacacacacacacaatgttgtacaatttatttagtctataaaaccaaaatgaggcttcaagtcagcttagttcattgtcatccaagcatacatattagggtttggtaatacaagcacatgttaaaaagtatttctaggctgggtgcgatggctcatgcctgtaatcccagcactttgggaggctgaggcaggtggatcacctgaagtcacaggtttgagaccagcctggccaacacgatgaaaccccatctctactaagaatacaaaaaaattagccgggtgtggtggcaggagcctgtaatcccagctacttgggaggctgatgcagaagaatcacttgaacccaagagacggagattgcagtgagtagaggtcatgccactgcactccagactgggaaacaagagtgagactctgtctcaaaaaagaaaaaaagaaaaaagaaaagtatttctacagtacaatatgtaaatagtgagagagaagttaccttctcactggtgatcaccttggttcttgccctcaaagtcaatcacggttgccactcttttttttttttttttgagacggagtctcgctctgtcacccaggctggagtgcagtggcacaatctcggctcactgcaagctccgcctcctgggttcacgccattctccggcctcagcctcccgagtagctgggactacaggcacccgccaccacgcctggctaatttttttgtatttttagtagagaggggtttcaccttgttagccaggatggtctcgatctcctgacctcatgatccgcccacctcagcctcccaaagtgctgggatgacaggtgtgagccaccacacccggccaaccactttcttgagtatccttggtaaaccaaaaagtatctgagtcaaatctcaacaaatttagaaagtttatttttgccaaggttaaggatgcaactgacacagcctcagaggtcctgatgacatgtgcccaaggtggtcagcaggggatggggttgggggtgcagcttgcttttatacattttagggagacacaatacatcaatcaatacatgtaagattaacattggtttgatctggaagggtgggacaagttgaagcagtggcagattagggggtgcttccaggtcataggtagatttaattatactgtgattaagataagggattgtgaagccgggcatgatggctcgtgcctgtaatcccaacaccttgggaggccgaggcaggtggatcacctgagatcaggagttcaagaccaacatggccaacatggcaaaaccctgtctctactaaaagatacaaaaattagccaggcatggtgatgggcgcctgtaatcccagctacttcagaggctgaggcagcagaatcgcttgaacccaggaggcggaggttgcagtaagccgagattgcgccactacactccagcctgggtgacagagcaagattacgtctcaaaaagaaaaaaaagataaagggttgtggagaccaaagttttatcctgcagatgaagcctccaagtagcagtaacaggcttcagtgagactagattgtaaatgtttcatatcagacttaaaagtctgcattgatgttaatgctggaggggtataatgaggcatatctgacccccacttccccatcatggcctgaacaagtctttcaggctaaattttaggtgtcctggccaaggaggaagtccattcctatggttgtggggaggccttcaaaattttatttttgattaaaccttctagaaatatcctatgcattatgaacatttttatacaaatttcagcatattacacatgttgttactttttttctctctctctctttgagatagtcttgctctgttgccgaggctggagtgcagtggcatgatcttgactcactgaaacctctgcctcctgggttcaagtgattctcctgcatcaacctccagggtagttgagactacaggcgcatgcaccatgactggctaatttttgtatttctggtggagacggggttttgccatgttggtgccaagccggtctcgaactcctgacctcagattattcgccccccttggcctcccaaagtgctggaactacaggtgtgagccaccacaccctaccgatacacattgttcttgatcatgtttatttcacttaacaatgttttggtgccaggtgtggtggctcatgcctgtaatcccagcactttgggaggctgaggcgggcagatcacctgaagtcaggagttcgagaccagcctagccaacatggcgaaactctgtctctaccaaaaatacaaaaattacccgggtgtggtggcatgcatctgtagtcccagctacttgggaggctgagccaggagaatcacttgaaccagggtggcggaggatgcagtgagccaagatcacaccagtgcactccagcctgggtgacagagtgagactctatctaaaacaaaacaaaacaaaacaaaacaaaatatatatatatacacatatatatgtgtgtgtgtgtgtgtgtgtgtgtgtgtgtgtgtgtgtcttggtgatcatttcatatctgtaaatatagatttgacttttttttcaaacaacaacatgctatactatatccattgtaggaatatgtcacaatttatttaactggtaccctactcatggatgtttagcttgtttccaatcttctgctattaccaacagtactgctaggaatatttttatatacatttctttgtgcacatgtataaatatatccaaaagatgaattcataaaagtgaaattggtactccaagggtatgtatatttttcttcttaatatatattctcaaattatctcctattggaatttggcagagattctggaattgcttttcatcgaggttgtaacacccaccaccaacataggcaacactggctatttatctcataatgcctctgtggatgtttccttcaaagaacaccagatggcagaacagaccctaatacgtttgccttgggtaacagggaacttccggacttgaagcctcattttggttatgtagactgaacaaataaagttgtagaaccagttgtacattaataaatctctatagatagaaatgtatcaattcctcagtaatatcatcagtaatagcagatggtagcctttgccttttttcctgtctacctgaaaaaaacactaaaaagatcctcatctttcgctctgtaattcttccccattacacaaacattactttttctccagctgaataatatagagaacgtgcgttagcaataataattcatggagtttcatttatgtgtgaaagtgacttatttagttcatgttgttacaacaaggaaatgtatgagcatatgtatgtcacataagaatatgtctttaagcaaatagaaatgaataattaaagttgatgcctttactataaggctttcatttgtcagaacaccagcaaaccaatttcacagcaggaaaacattttttttttctttcctggagagtatgtcatctgagcagaacaaattcaattagcgttgtacctgctttgcaacttatgagaatgcttttatgcctctgggtagctgctctcaacccacagcccacagcccacatatacccaatagagaaggtactcatgaacttgtatatgctcttccgtaaaactcttttcagtcttcaggatgtagtactttttaaattaatccttcattgccccagaagataaaccggtgggaagttaatgaaattggcgtcctaagctacctgctcaggatcaaaatttgctacctactacagatcttattattgtccttcttgagaaatgacagatgtcttattttaaaggttctaagataagatgtacataattttaggggcagtatcatctagtcgctgtagttccttggaacactacaagtccttaagctaaacaggaagagactctgccacaaagaaggcaacattgagattaatgaagatttattggctaggcgcggtggctcacgcctgtaatcccagcatttttggaggccaaggtgtgtggatcacttgagaccaggagtttgagaccagcctggccaacgtgacttaatcccgtctctactaaaaacacacacaaaattagccgggcatggtggcaggcacctgtaatcccagctactccggaggctgaggcaggaggattgcttgaacctgggaggcagtggttgcagtgaaccaagatcatgccacttcactccagcctgagtgacaaagcgagactccatctaaaaaaaaaaagaaaaagaaaaaaaaaagatttattaagtactagatctttcccaactgccatatcacgttacaacattttatcaggcaaaagttatcgtgcccctgtttcagattaggaaactgtggctcagaaaagttaaataacttgcccaaattaacacaactgccaaggggccaagcaggaatttggatgcaagtatatctacctcctagactgatggttctcgatgtatggcccccagaccagcagcatcaccatcactagtataacctggaaattttttatgaaacatttttcaggacccaacctgctcctcctaaagtagacattctggggttgtggcccagcaatctatatctatctatctatctatctatctatctatctatctatctatctatatctatatatagatatagatatagatatattttttgagatggagtcttgctctgtcaccaggctggagtgcagtgactcgatctcggctcactgcaacctctgcctgctgggttcaagagattctcctgcctcagcctcccaagtagctgggactacaggcatgcgccaccatgcccagctaatttttgtatttttagtagcgacggggtttcaccatgttggccaggatggtctcgatctcttgagctcgtgatccgccagcctcggcctcccaaagtgctgggattacaggcatgagccaccacacccagctcagcaatctatattttaacaagtcctctaggagattctgatgcaagttcaagtttgagaactattgtcctagacacattctgccacaatatcctgatacatgggagggatgcatgagagaggaaactagtgttcctcgagtcaccatcacgagccaaacactgtcatgagtgttttacatcctattccctttaatcctcacaatagccatgcaagttaggtgttctgttttgttttgtttattatttatttatttatttatctagagacagagtctcactctgtcacccaggctggagtatagtggtgtgatcttggctcaccacaacttctgcctcccgggtttaagcgattgttgtgtctcagcctccccagtagctgggattacagatgtgcaccaccacgtctgtcatgtttgtatttttagtagagatgggggtttcgcctagttggccaggctggtctcgaactcctggcctcaggtgatccacctgcctcggccaaaagatgctaggattataggcatgacctactgtgcccagccttgttttttaaattttacattaaggaaactgaaggtacaccgaggaaactgaggatgataaggtcatttgttgaagctcccaataccaataagaggcactttacacttgggcctatctgattccacagtgtaaacttcatgccaaatccactggtaagttctatccttctatcctaacagtcatattggttggctaagcgtttgtcttaagggtattcttcacacacaattgtaattagcctgattgtgcagttttccagccaaaatctagatgaatgattataaatgagagggatgctgctagaaatacattaaagagagacaaaagtgacaacatgccaggcgaatagtctagaaggagatagtaaaaactacacaaaaaaatgcataacttaaaaaaaacttaagaccgtatcactttgtaattaaaaaagcaataaagattagttataaaagttgagggtctgaggctgttttgtgtatgggtctacacttcaacaattcctgagcttgtaactagaataaagaatatcgtaatgatgattacaaaatccatggaaaatagattgaattttccatattaaagtgtgtgaagtgcatttcaaaaagatctgcatgagaaatggttaaaatgagaaatgtgttgactcaagacacaagctataggttacctgtgcaactgatccatctggaatattacattcatcagggctgctattgcctgaaaccaatttggactcggactgctgaaccttcctgatatggctgaatgtttgtgtgcctccaaaatgcatgtcaaggcccggtgaggtggctcatgcttgtaatcccagcactttgggaggctgaggcgggcggatcacctgaggtcaggtgtctgagaccagactggccaacatggtgaaaccccgtctctactaaaaatacaaaaattagtcggtcatggtggcgggtaccaataatcccagctgctcaggaggctgaggcaggagaagtacttgaaccccggaggtggaggttgcagtgagccaagactgcgccactgcgttccagcctgggtgacagaccaaggctctgtctcaaaaaaaaaaaaaaaaaggcataggtcaggcgcagttgttcacgcctgtaatcccagcactttaggaggctgaggcaggtggatcacctgaggtcaggagttctagaccagcctggccaacatggtgaaaccccatctctactaaaaatacaaaaaaattagctggcagttgcctgtaatcccagctactcgggtggctgaagcaggagaatcacttgaacctgggaggtagaagttgcagagagcagagatcgcgcctctgcactcaagcctgggtgacagagtgaggatctgtctcaaaaaaaaaaaaaaaaaaggcatgtcaaaacttaatccccaattcaacagtattaagaggcaggacctttatgaagtgatgaatgcccttataaaagggtttgaggaagaaagttcagccagtattagcctttctgccatgaaaggatgtagtaagaattcatgccttctgccacgtgaggattcagtgacaagactccatgttggaatcagagaccagccgtcaccagacactgaatctgcaggtgccttgatcttgaacttcccagcctccagaactgtgaaaaatgaattcctgctgtttataaatgaacctattcaaggtatttgtgttatagcagcaggaacagaccaagacacttctttttgtcccatctttattgtgtgtgtgtgttttttgttttgttttgtgatggagttttgctgtgtcgcccaggctggagtgcagtggcagtgatctcggctcactgcaacctccacctcccaggttcaagagattctcctgcctcagcctcctgagtagctagatctacaggcgtgtgccaccacacctagccactttttgtatttttagtagagatgggatttttgccatgctggccgggctggtctcgaactcctgacctcaggtggtctgccctcctcagcttcccaaagtgctgggattacaggcatgagccactgcacctggcctctcttttttattggtaaaaggacctcttgtttcatgcagccctagagcttgctctcctaaactcaaaggtgggaaacagagactgaggtcctgacttggatccaattacatggaaaaggtctgaagctcaggtttaactgaagactcctgaaataaaagataagaatcctggaggagctgacccatctttcatccttctgatacaataaaaaaggccccatgagactgctgtagaagagacttcaaatgccttctaagccattgtggctactgtgggattggtcacatattagagaagattttttttgtttgtttgcaacatttctaaccaggattttttttttctcactgagttataccaggctttgatagttagttacaaataaaaaatgagttagcctactattagagtcttgaatgtccaggagaaataagactaagactaagagttgtacagacaattctcttgaattggcaaaaaaaaaaaaaaaaaaaaaaaaaaaaaatcaggccagtagactttcatgagtgttctgccctaccagcatccttcagcacaagatgtacctgctccaccaatggcaagccatagctgctaacaagatcacggtaattcagagctcctgctgcttcttgcctgggtagtcaatgaagtctcaccaggggaagaaaagaatgttcctccctgaattgttcatcaggatggactcattactcgcttctttctgcttggactgaagcgacaggatagcaatttagggatggctgatctaaagcacatcaaggcacggtcgctgagcaggtgcggtggcaccaaattcaaggaaaccccataggtagttcccaccagcaatgtgggtttcagcctttataccagcaccatctgaacaagccccataaaaagtgcagattacaaagcagaagcattttccatgtgggctaacacatgaggtggttgaacaaaaaagcagtagaagagacagccatgcccagaggccagctcagttcttgatctggaagttactttctgccttttttcctgtctctgtttctactagaagcccgctttcttcaatctgctttattttttattttagagagaatgtctcactgtgtcacccaggctggagtataatggcacagccatagctcactgcaaccttaaactcctgggctcatgccaatcctcccatctcaacctctggagtggctgggactacaggtatgcaccatcacacctggctaaatttgtttttttttaagagatggggtgttcctatattacccaggctggacttgaattcttggcctcgagtgatcctgcctccttggcttcccaaagtgctgagattacaggtgtgagccacttcaccaggcccaatctgctctttttttttttttttttttgagatggagtctcactctgtctcccaggctggagtgcagtggcacaatcttggctcactgcaacctccacctcccaagctcaagcgattatcttgcctcagcctccagagtagctgtgattacaggcaaccactaccacacctggcaaatttttgtacttttagtagagatggggtttcaccatgttggccaggctggtctcaaactcctgacctcaggtgatccacccaccttggcctcccatagtgctgggattacagccatgagccaccgcacgaggcccaatctgcttattaatcttagtgtacagttcctactatgtgccaggcatcgtgctaagtgctttctataccttatcttatgtgattctcacaattcgctaagtcctattatttccccctttctcagattcagaaactgaggctctcagaggttaagtattttgcccagggtcatgcagttgttatggggtagagctaggatttagactcaggtattcggattccagaatcccctcacccttgccattaaaggtgtggtctctggaacagggacatcagcagcagaagcaagtatcatccatcacctcagagctggtaagaaatgcagtctccaggctcggcgcagtgactcacgcctgtaatctcagcactttgggaagccgaagcaggtggatcacgaggtcaggagatcgagaccatcctggctaacacggtgaaaccccatctctactaaaaatacaaaaaattagccaggtgtggtggcgggcacctgtagtcccagctactccagaggctgaggtaggagactcacttgaacctggaaggcagaggttgcagtgagccaagattgtgccactgcattccagcctgggtgacagagtgagactctgtctcaaaaaaaagaaaagaaatgcagtctccagtcccaccgccatgcccgacactgaaggaaaatctgcatgttctttttcttttttttttttaattttttgagacagagtcttgctgtgttgcgcaggctggagtgcaatggtgccatctctgctcactgcaacctctgcctcccgagttcaattgattctcttgcctcagcctcctgagtagctgtgattacaggtttgtgccatgacaccaggctattttttgtatttttagtagacagggtttcactgtgttggccaggctagtctcaaactcctgacctcaagcaatccacccacctcaccctcccaaaatgctgggagtacaggcacgagccaccgcatctggccaaaatctacattttaacaagatccccagatgagtcctgtgtcattaatctgatctagtgccatatgtctgctgcccactgatgtgcctctcctcttctcctcccaatccacctccacaccctggtaactaagtgctgggacaggtagggaccagggagtgctgggggcagggatggagaaggggcaggtgttcacctagagctcaaggctggtacacatgctgggtgggacccagaggggtgctgagtgggacccattacttccacagacacggaaacaatttttattactacttcccaagcctggcaatgtttcatgatgcaaatgggctggactgctcaccatttaatatttctcttcagtacttgaatcattaccaagacacagccacctaccactgacctctgttccccagaggatttggacagtcattagagcccattttagtgcagaccttgtccttttgataaatgagttgaaacttaaactccttggctgagaatgattatccagcccccgaatggaatagatctggtgttggggtgggggttggctagcatctcatccactggctactcaccctggagtacatctccaggtctccaagggcttttctgaaatatatccctgggtcctctccaatatcaataaattagactctgcagggtcgcccaggaatatacatttgttgttgttgttgttttgtttttcttgagatggaatctcgctctgtcacccaggctggagtgcagtggcgtgatctcggctcactgcaacctccgcctatcgggttcaagcgattctcctgtctcagcctcctgagtagctgggactacaggcatgcgctaccatgcccagctaatttttgtatttttagtagagacgggatttcaccatgttagccaggatggtctcgatctcttgacctcgtgatccgcctgcctcggcctcccaaagtgttgggattacaggcattagacactgagcccagccgaatatacgttttaaatgctttccagttgaaaacagttattttggctgggcatggtggctcatccctgtaatcccaggactttgggaagccaaggtgggtggatcacttgaggtcaggagttcgagaccagtctggccaacatgctgaaaccctgtctctactaaaaatacaaaacaaaaacattatccaggcatggtggcacacacctgtaatcccagctgctagggaggctgaggcaagagaatcgcttgaacccaggaggcagaggttgcagtgagccgagatcattccactgcactccagcctgggtgatggagtgaggctctgtctcaaaaaaaaaaaagaaagaaagaaaagaaaaaggaaggaaggaaaggaaagaaagaaggaaagaaggaaggaaggaagaaaaagaaagaaagaaagaaagaaaaagaaagaaagaaagaaagaaagaaagaaagaaagaaagaaagaaaaaagaaagaaaagaaaatagttatttctattacatcacctcccctctcccaccaaaaatcctggggactagaataaatcagccttggcacctggttatctgaacgatgcttggtcacatccagaggcaggtaacactccctaatgagacagccctgtttcattttgagtcagctccaaatatgagaagtttttctccagtctctgaggttggactttgcctctctgaaacctccactgaacatctcatttctaactctttgaccaaacaaaatatgcttaatttctcttttacctcccagccattccaatatttggaggcaaatgggaagtggaaggagcaaggatttagaaatctattagaaatgggctcaaattgctgctctgtctgatacatgttatagcatggatgaactctgaaggcatgctaaataaagtaagacagacacaagaggaaaatattgtgtctaagtcctcttacatgaggtaccttgagtagtcaaattcataaagacagaaaaaagagcagtggttactattggagggatgggagaatggggagttagtgtttaatggatacagagtttatgttcaagatgatgaaaagtttctagaattggatagcggtgatgaatgttgatatggtttggctgtgtccctgcccaaatctcatcttgaattgttgttcccataatccccacgtgtcatgggaggtaaccagggggaggtaatttaatcattttggggtccttaccctcatgctgttctcatgatagtgagtgatttctcatgagatttgatagttttatagggggctttcccccactcattctcattcttctctcttgtctgctgccatgtaagacctgcctttgctcctccttcaccttcaaccatgattgtgaggcttccccagccatatggaactgtgagtccatttaacctctttcctttataaattacccagtctcaggtacgtctttattagcagtgtgagaatggactaatacaaacgtacaacattgtaaatgtgtttaaggccgctgaatttgacatttaaacacggataaattttatgttatgtatattttaccacaataaaaaaaatcaaaaaatgctgctgtcatttactagctatgttgtttctctgagctgcagttttctcatctgtaaaatgggtactgtttaattgtaactactgtgcatgttgttgtgacagtcagataggtttagttaattaaagtaccatccttgtattttcatggaaactttgagagtagaaagttaatacatgatgactgatgggaaatccggatttataatagctggcattattaacactgccataaaatcaaaattagccattagtcagagagggcagaattcatgctttaagacatcagaataaaaataagtttgaagatgaaacaccaggcttcaaagacatttcggcttttagtgggcagtggagctatggacccagacctgctccagggactcctggctgattctcctctggggttaggaagttggcagtctgagaagctctgctcgagacaatggtttccatcccctgctgtgtttcagaactgcctgagacaattattaaactaaagacacctggtcccgtccctggagcctacaatttagtcaggcattagttcaggatctggatgtatttttagtttgctccaagcgaatctgaggcattaccaggtttgaggaccactgcgctagggacttctggctgccctgactgcccaagagtagttcaagtagctgagtgaggagttttgatgggagacctgagagatggtcctaacatcccagaagttccccacatggctaagaaagagagggcagccctaacttgggagcaaaaatcagttgaaggtttgtattaatcagggttctctacacaaacctaacagtaacattctgcttatatataggatttattaggttgatgcaaaaataattgccattactttcatggcaaaaactgcaataattttcatttttttttttttgagatggagtctcagtctatcacccaggctggagggcaatggcacaacctcagctcactgcaacctccatctcctaggttcaagtgattctcctgcctcagcctccggagtagctgggattatagggattacagacagctaatgttttttgtatttttagtagagacagggtttcaccatgttggccaggctggtcatgaactcctgacctcaagtgatctgcccacctcagcctcccagagtgctgggattccaggtgtgagccactgcacctggcctgcaattacttttgcaccaagctaatattatgaggaattggttcatgcaattatggagaagttcacgatctgccaactgcaagctggagacccagcaaagcccatggtataattcagcctgagtgtgaaggcctggaaccaggagaactggtgatggaaaagtcgctccgagagcaggggaagaggagagaagaggagattctctggctgacgcagagagacaggggaaaaggagcatactcctcctccttctgccttttgttctattcaggcctttggtggattggacaatgcctacctacattggggagagcaatttactttactgagtccacagattcaaatgcttatctcctctgtaaacaccctcatagacccatccagaaataatgttgaatctgggccctacttggccagtcatgttgatacgtaaaattaataatcacaaaaatcaaagacggaaagtaaccagaaagagatgacaaggagactgcagcatagctttagacctgggtcaagttcagattaaacttcttttaatcgaaaacatgtaatggggtcaaaaaactacctatcgggtgctctgctcactatctgggtgatgaaataatttatacaccaaataccagcaacacacaatctacccatgtaaaagacctgcacatgtaccccctgaacctaaagtaatagttgaaaaaagacaaaagcaacacacacagacacatatgcacacacacacacacaaacaaaaacaaacaaacaaacaaacaaacaaacaaacaaacaaaacagggccgggcacggtggctcacgctgtaatcccggcactttgggaggccgaggtgggtgatcacttgttaggagttcgagaccagcctggccaacatgacgaaagcttgtctctactaaaaaatacaaaaattagccaggagtggtggcacatgcctgtagtcccagctactcgggaggctgaggcagaagaatcacttgagcccaggaggcagaggttgcagtgagccaggatagtgccactgcactccagcctgggcgacagagcaagactctatctcaaaacaaaaacaaaaacaaaaaacatgtaacatagctccactgtacagcgtttgcttacagaggttgcttctgcaatgaagagaattaggcatctgacttgaggtatgattacagactgcagtgaaagctggaagttgaaaagtggaagagttatgtgctgagtataaattctggtgcaccaaaggttctattactttctatctcaaaatcaaatttcaattgctctgggctcctacccaatgactagcagaaagttcaatcctcatagattcctgagtctgtcactcactcctcctccacttggtcagaaagtccctgggctcctgtggccttagaaaagtggcccagctgtctatggccatgtcaccctgaacattctccgtctgtctgatcttggaagctaggcagggtcgggcctggttagtacttggatgggagaaaagtggggcagggg

SEQ ID NO: 341 - DNA, 28141 bp, Homo sapiens
ggaacttggtatcaagacactcaggagccttggttggatatttagacatgcctggggcagataactgaatggccaaggatggacagcccatcggtccagcatctgatccattttcactgtcttcaaggcaggtggcaggtctttgcacagtgagatgtgaagtggattgaggggtgaggccagtggtgtcaccttgggatgaagaaatgcttgcccactagtccatcaggataggcttcttgaaagagtagcaatttcgggaacaatgtgacaggtgagacagagggtttggttataggaaacggttattgagcatgtgctgtgggctggtgcagctctagaaaataagggtgaagagtggtgacccctgccctgatcatgccattgcactccagcctgggcaataagagcgaaactccatctcaaaaaaaaaaaaaaaaaaaaaacccataaaatgtttttcaggttcattagtgttgtagcaagcatcagtatttctttcctttttatgaatgaataatatttcactgtgtggctatagcataatttgtttatagattgatggacatttaaattgtttctactttttggctattgtgaataatgttgctaagaacatgtgtgtacaagttactgtctgaacacctgattccaattctaggagtggaattgtgggatcacatgttaactctgtgtttaactttttaagcaacagcctgtacttctaattgcattacttaaattcaagcagtggtggtgagacaggggtaaagatgacatctgagagtacatactgttatttttcaatatttacaatttcttttcatctctttttctgaaagttgtttaaagtggaggagaataagctgagacgggccatcatctagtaaactgccccataggccgaataaactcctttgtactgtaagccccagcaggccagggatctttgtcagtttcaattcctgacatatttcaagtttagaacagtgaatggcatatggttggtgctcagcacatggctggtgctcaataaatatttgttgcatgaataaataaatacaatgaactgcctcaagtgtgctaaaatctcaagaaaacagacgtccatcaagtagaaccagaggagaatgggccgactttgtagccagaagtgcatggttagatatggtaaaggacttcccagagctatggggccctcagcccttggggaagcctcaacttcttcttttaacaccagccatgtgcaggtaattttacatatgtttatacggaagctctgagaggctgtggattccacagccaggcagcctagacggtggaacctgaatccaccccaggctgctggtcatgcaggccttgctcccactgtggggacagtggtccctccatcccaaggccaacgctcagccctaagaaggcctggggtgaggtcagcccaagggtacccaaggggccctcagaagagccgtggaaaatacatggtgcggccagaggaggaaggaaggatggcagcagagcatgcaaattggaagctgatatcgaattgcagcaaaatgagcagaggattagatgccccacctggacccaccccagagaataccaaggcttgggccggcccttgtgagaagctggcaggcccagtcccaggtggaagcctggcccctggcccgatgagcaggggcgatgaggcagggtggctgatcccaggcaggaagacaccactgatttgggtgaggccctccttcctgagccctccaccctcagcctgggcatcccacactcatagagctcctcctggttctggggaaggagcaggattagagccaagctgagaccctatcccaagttcctgccttcagagagtgcaggggagacggggataggaacacatccaaatgcccaggattctgagggggttgggggaaggggaagctgccttgactgagtaagtcagagaaggcttcctggaggagagcgaagggtgtggggctgggttgagatacaggaagatctgggtttgaattatagtttggctgcttcctagctgtttgatcttggacaaaactttcattcattctatattttttggagtgtctactccatgccaatcatgtgtgaaatgttgggataacaaaggcgaattcaatctggctctcgtcctcggagcttaagcaaatcatctggggtagcgtgacccatgctacgatggaggtggaatacggggctgcagggcggggccacaggacatagtgggcagcttaacctccttgagcctccctatccctaattcacgtgatggggtttgtaaccacttctcacatcgttgagagaaaagggtgagcctgactcagaggtgtggcaaaggaagggcagggcaggctttaaggacagggacagggctgtcagaggctgaggctagggaggggcaggaaggggtgtgaggcagggcggaagagagcagggccctgggcaggtgctgagccaggtcctgcaggtcacccagtcgcttgagtccacgaatgctggaggcaggcactggagagccagggtggttcagccgcagctcctctgagcagggagtcaaacaggtttgggtgacccttgtgagcaaggtcccggggcatcactaatttccacccccttctctggtaatgactctggtgcggcctggccctggcagtcacagctcctctctctccctatagggctgaaacagacaccagctctccaggaccagctggtaagagcttctccactgcccccgagccctgacaggaggactcccacagtgtgcatggaagcccagggagctcgggggctacagaggcaccattggctctggagcctgcagcccagacagccccctccagatgtaatgggggaaggagccagggactgggaggaattcagaggtcagaggaggagcagtatcaggagatactgccctcctgcaactcctcctcccagctgctctcccctcctgctagtgcccacaatggctcccagctgcctcctataaggaagctttattagcctgcagcctgtactcctccacgcagcagagctgacaggaccccattagtcagcttattcaacccttcccctggtgcacaaacccttgccaagcttttctggcattttgctcagcctgcttggaccctccaagcaggtaggaactcactgtttcacaaagcagtgttattagaaaggtttccctgaccctagccccccacatctaatctttctcaaatgtgggcagacttgttcctggccccttctcattccaccagtgcacacatgcacatgctccctctctccatccaagctccaggaatcaacctctaccctgaaccaggtccctgaggaccaccacgtggctgcaacacagcaggtgtggggcagggcacaagtgggcttaaggggggtataagggctggcagtttgctcattgattcactcaacaaacatgtactgagcacctctaaagggccagggcctgtgctaggcactgcggtgccatggtgagcaaatccagaaatggaccctgccctctaggagttcacagtccagaggagaagcccgatgctgaacagagaatcacatccgtgagcaacacaaaaggcaaggcaaaccctgggcagatgcccccgggactgtgtgttatgggcctacaggaagcctctcccaatgaaaaagcaatttttcagccagaacctccaccagtgtctttcaaactgtgagtggcaacccatttgtgggtcataaaatcaatttagtagttgtgacctgaattacttgttagtgaaatagagaggaatttacaacatcacacttaggaaatactgttttgtgaaatgttagtttcagttatctatctatctatctgtctgtctgagagatcatgtttattagttaagatattaaatgtatttcttactgcaggtctcaatcaaaaacctctgaaagccactggcctagagttagaggaagagttagccatgagaaatggtggtgacacaggttccaaaagaagaaacaataggtatcaggctcagagatgaaagggctagaaggaggacacaccaagttcaaggtctggcctttctcgagggcagtggggagccatgggaggttagcaagatcccatcttcttcatccctgggcctcaccccatgggcaggagggaaatggcaggaagttgtctttgtgtctccccaggagcctggacctgtggccttccctgcctccacctgggcctcaaccgtcacgaccacctggcctttgaggtagggtttggagaaggaagtcagcctattatcaggagaaggcttgaatttctatattcatagcttgtttctgtcacttactagccttgtgatcatgggcaacttgtctaatctctgtccctcagtttcctcctttgtaaaataggtctcatagaactcatccccaaaagtccttgtgaagatttagtttgtaagccagatgtctgcagacctccagtaaaagaatatgtttttggtattagtatgtatgtcccaaatattgcttggaatatgcttatacaaacaaaaatcatttgttttttatctgaaattcaaatttacctggatgtcctgtattttatctggaaaccctacacagaaatcaaatggctcacgctgtgtctcagagctgcaacgatccaacgccctccatccttcagaggctgtctgagtccggggacacaactcccaccctcctctcctgccagccgcggcccgtggctgctctcttcacttcgtcccgcttcgccccgactgtggatctacccgctcccttctccctcagtccccaaagcaccagactcacaggcctgctgtgtgacccacttttaccgacctttcggggagagtagagggcatttgtgactcagctcagagcaggaaacacatctcacgtcaactgtcagacagcgctgctccgaatcccatcacagtgctccagcagggggcgtcctcaccggccgcggccacagccacggctcaacccggcctagctcccagacaccctccttccaccgcctgttttccaccgtccccgcctgctctttcaagccagcagcaaacaacaccctaatccgtgtctttattattcaaagaccttaagcactctttcccacctcgttcccatcttgattatttcagggaatgaattagggattcacctttacaatcaaaaaagttctctcaaagccaggctactggagttctaattctgccttcccacttttactagctgtgaaatctcaggaaagttacttaacctctctctgtctcattttcctcatctttaaaaaacaggatgataatatttagctcctaagatggttgtgaggatttaagtgagctgatatatccaagaatgtctagaacagcgcgtggcagaatgggcattgcatatgggtttaatcttgtaactgccatgtttcaccaattctaaggtgtatctcgtttctcatcataagagctcttccgctcgtgtggcagctgggagtggccgtcattgcctgcgcatacctaaacttggtcaggtgagttccgtgccttcagcttaattgctgtttaaaatgtcttcaaaaaggttacactgtggtttagcatttaaacccagttactgtgtatgcagaaaggcgggcaaacagaagagtgtagcaagaattttatattagtgaagcagttatcattgaagaatgaccacagtttcatattttcttgcaaaacagcagccaagtgttttgtgagacctaagaaaggaagagccccataagtaaatggaactgttgtgttgttttattaccgagaaaagggcagaatgattgctagtcacacgtgaagcaagaaaaccccggcaataaagcttgcagaatgagtggctgaggcttgaaaataaatggtggaaacaatagtggacaatcttttaaagaatggcacattgccaatgctcctgatggcacagaaggtgacaccatgcagaaaatcaaggctctgagtcaaagagggtttcagaaaaattggactctgaatgtgaagaaatctggggactattttagccaatttgttttgcctataatttccttttatgcatgcaaaagagcaattctgactttaaagactgatatctaaataaatctaaaatatcttttttgtgtgtgtgtctgtgatacagtgtctcgccctttcacccaggctggagtgcagtagtgcaatctcagctcactgcaacttctgcctcccagtctcaagcaatcctcccacatcagccggactacaggtgcacaccaccatgcctagctaattttttgtgagtattttttgtaaagatagggtttcaccatgttgccagactggtctcaaactcctgggctcaagtgatccgcccaccttggcctctcaaagtgctgggattacaggcatgagccaccaagcccagcctataaaatacgcataacataaaatttaccatcttaactttttttttttttttgagacggattttcgctcttgttgcccaggctggagtgcagtggcatgatctcagctcactgcaacctccacctcctgggttcaagtgattctcctgcctcagcctccgagtagctgggattacaggcatgtgccaccacacccagctaattttgtatttttagtagagatggtgtttctccatgttggtcaggctggtctcaaacttccgacctcaggtgatccacccacctcggcctcccaaagtgctgggattacaggcgtgagccaccacgcctggccctcatcttaaccatttttaagtgcacagttcagtggcattaagcacattcacattgctgtgaattcatcagcaatttttgtcatgttctaattaatagtgcatgatagatgcatagacttcctaagaaacagtgtagtggccattgtagaaaaaatgcagccatccctgcaggtgagcagagctgccagccagaagcacagccaagccccgccagctttgatgagaacaccttcttcctccctggcatgaagggaaagtcaaatgcaaacacaggcatgagccgtgtcatcgttggccccttcccctcctcccagactaggggccagatcagaatgtgagtcctgactactattgtaagctgtgcggcaggtcatactctctctggaattcatgttctcatcatggaaactgaaatccacaggcaagatgatctctaagatcccattagcttctaaatgtatgattgtgtaactgaacaaccacacaagacacacaccacaaacatatgcaaattcgggttgggtctttgtgggctccaaggagaagctgtcacacctatcctggtgtattgggaagcaagagatttttacccgactgggttaggagtggttcttcccagaatcaagggtcagtaggccactctgtcaagatcgtgaataccttgaccaaaggagagaccagaaagggtgtgtggcccatccgagagcacacagcaactaaatggttgggtgtggatttagaagccactgtcacagcttcagttcacatgaggcccaaggagaaggttttccaggaacccctgagactcagtcctgaacttggccagttggggtggacagtatatccgaaggtcaggagaagtgatacatgaaaccacaaaagaaaggagtaggccaggcacggtggctcacgcctgtaatcccagcactttgggaggtcgaggcaggtggatcacaaggtcaggagtttgagaccagcctggccaatatggtgaaatcccatgtctactaaaaaaaaatacaaaaagtagtcgggcatggtggcatgtgcctgtaatcccagctactcaggaagctgaggcgacagaattgcttgaacctgggaggtggaagttgcagtgagctgagccactgcactccagcagtggggaaggcatgttccctgggtgggggcagaggcacaccccagccagacccctctgagtccttgtctcttcctatgtgcagagtctggaggtgggccccagatgccctttatatgacaggggttggggtccccctctccgtcgatcttctcccggaggacccagaatgcctgaagttgggagggatggctgagggaagagtgccagggcaccaggtgtctatgtgtcaggccaggagttaggcactggaaatacacaggagaacaaaccccacaggaatccctgctcttttggaacatcacttctgtatgggtaatttttattctttcttcctccccttcctcttccgctttctcttcctcctccttcataatagcaggagtcacgagtccccatatatatatgtatatgatacattctcagttgcaaaataccttcccgttcattatcttactgcattctcaaaacaactttatggggtaggcatccacactcccattgtccagacaaggaaactgaggcgcagaatgtggctcggtagtgtggggtgtggcagaaagctccagaccaggctccagtcccagctcagccactaacctgctggagcaccctagataagtcactcccctccctgggcctatactcacccctcctgcccaccccacatccccatgatacaacacaaagcgctccactccagtctccaatctctcccagatttctgttcctgcgactgtgacttgcccagggacctgctggacaggagctagggcagggtgcagaagcccgtccttctgtccccactctgagcctgaccctgctgtgaatccccaggagagggagcgaggctggagggattagggaagggccagtgagtggggctggggaaacttctagacttgaacgcctccaggaccccagtggccacagcagcactgatagcaggaggcagcactgcccagatgctgagctgagtgggcaccaaggccagagagctgcttatcaggcatcacagccgccccgagcctgcacagctcactgccccacagaaatgtctttctcctgtggccagagcggccctgagctcctcagggtttctaggacctgtcacagcttctgggaccccaacaaatgagtgtgcaaagacctgttctcctcaaagtgcaaataatactgtaagtaagggctgatattcattgaccacctactgtggacgaggcgctgctctgagcacttgacatacattgtttcattcaatccaaaccccaatccactaggtcagttttattctccccattttacagagaaagacaagaaaggttaagtcacatagatggaacaggctgatgccagaatggacaccctcagcttcctcagccgccccaggttgactccatcaccaagggccagggtcccagtgcccccaggctctaggagctgctgtttggctggggctcccaggagaaggtgaagcttaatgatttatgggtgattagctgcaagaatgcaagcacagaagacacaaacctttatgccttggaaatttgtcacaagccaaccagttgttttccatccctgtgaagcaggaataattggaggtctgacagaagaacttcccagttaccagaaggagcagcactcatgttctctcttagttttgtgtgaggtgttgcccctgccttggtcaacagtttgagtcagagagatgggggccgggcacaatccccaccagacgttcccattcacaagaccctgtgggggctgggagacgccctggggcagcagccctggggtaaccaagggaacaaacacggaaaaccagggacgtcagtccttatctggagctcattaaatggggaacattagtcagctgtgaaggccaagatagggtgataggcctgtgggtgggctgggatggggcatgggggcagaggccgccatggaggagaagaggtattggcctcaacgactccacctccccgccacgtgcccagatccgggatggaaggaccctataaatgcccacaacccagcctccccagaggccttgagaaagagagcgatagagtgcgagagcgagtgcccggagcatcctggccctgagacagctgggccagccccgcagggctctgcagcatgtgggagctccgctccatagccttctccagggctgtgttcgcagagttcctggccacactcctcttcgtcttctttggcctcggctctgccctcaactggccacaggccctgccctctgtgctacagattgccatggcgtttggcttgggtattggcaccctggtacaggctctgggccacataagcggggcccacatcaaccctgccgtgactgtggcctgcctggtgggctgccacgtctccgttctccgagccgccttctacgtggctgcccagctgctgggggctgtggccggagccgctctgctccatgagatcacgccagcagacatccgcggggacctggctgtcaatgctgtgagtagccacaactttgccatccacaaggggcaggtcctggggaatcccttgtaaaggatgagatgggagggatgggctctgggtgatgtagggagagagatggagacagaggcagagagagaggctggagccaggaacacagccaccataggagggtcaggatgaaaggagcaatgataccagagcaaagcaggatgcagacagactgctggcttcttccaccctgaccgtcgtgcaggaagagcctcatccaggtttctgttggactcaacgcctacattacagtgaagacagggctatacctcagcaggggttggtgtcccgagcagacatgctttccaagctgcggggagccttggagtgatcatcacagggttctcaagagagaagaggggcccagcatttcttctgctttgagggtttgcaggtcccgtggcaggtgctccttacaggccaggcacggacacaccacagccctgcaagcagcaatgggcatactcacttctccaaaccttgaggaggtccccggagcccataagctggctgctgattacatgatacaggcgctaactgggccccgtgggccctttgggagctgagggtggtgccacagtcccttcccccatgtcccacccacttcccctctcaagtctgtgtgggccctgtgaatccaaggcccatgaatgtggaggaatgacctgtgcccccaacagatcaacactcactctgtacccccatcctaagccaggacagtgagtgcctcttttgtgcttgtttccggtagttcccggccttttccatccttgagccactggacaagagtcctgatgtctttgatgagtcccgcacaatctctgtgggcgcccccttctctgcacaagtggcccttcctcatctgtgggacagaggtatcccaattagggaacttctctgctttgttttgttttgtttttgagatggagtctcactctattgcccaggctggagtgcaatggtacaatctcaactcactgcaacctccacctcaggccattctcttgcctcagcctcccatgggattacacgcctgtaatcccagctaatttttgtatttttagtagagacaggactcgccacgttggtaaggctggtttcaaactcctaacctcaagtgatccacccgcctcagcctcccaaagtgctggaattacaggcatgagccaccacacccagcctctgttctttaaagaggaaaatatgacaaggctgggggccaggggccaaggaaaggctaggtgggcaagcagaggagtgggctcatttcctctgagaacaaaattagttcagtttgcagcaagaagaggtccagttagactgaaaaaggaacttcctgagagcatgaccaggaagtccttctctaatagcagggcactgggagtgaaaggccatgggaaacatgcagtcctcctcctccatcatttcacaactgactggggccctcagaagagaaaggtctgggagggctcctccatgccacttctcagcatttaccaccttgaggacctggggagaaccctgcctggatggaatggggcagtggtgggaccaacttgctctgaggctaaggagagccagatgaccctcaagacaatcccaagtgtcctttgaggacactgagagccagcctggccaccaggaagttaatcattgacatgcacctgccctgtgccaggccagctatcatctcatcattggtacaacgctataagggaaattctgtggttccccctatggtgagtggcaaattgaggctcaacagcaattgatcaaagtcacagaaccaatatgtcatttctagtcctcccacagtcctccagaatccattttcttatcccatttcacagaaggagaaactgaggccaaattaagtagtcccatggcaagtcagaggcctccaaagtgtctgcttccaaagctcttttcactgtcctctagagactctgcattggacaacaataggagggattgaggttagaccctagagagacccaagggttctgacctgatgtctcggacccaggggtgggggttcagggcctggagaaagagcgtgggagctgagagctgtcactgttccacccagtgcagtgcccagccccagaaggcagggtgtagggtacagggtgacaaaacccaaggagaaatccagtgctgggtgcggcccagttatgaaatcacctctttactcagccccgagttctctccttacccaaggcagggtctgctgagaccatgggcagcctacatgggtgtggaggcattgtccaacacagctccagggcccttaccccaacctccataggatgtgcagggagcaaactaacagggcaaacctgaggcctgaaaggcagtggggaatagacaagggttagggaaagaggtagattccggactcatagcggaaaggggcacactaggactgtcccccagacccaagtccctagaccctgtctctgggagccatttaacctcaggaagaaagaccacaggcctctcattgcaccaaggtctgatggtctacagacagaggaaggtcttcctgctaaccggcccaaagcttcctgaggcagttgaaacctcttcccttcttgttctttgggaaacagaaattccggatctcagcattcttttcctctcatactgcaggctcccagcctcaggccccaatctaatgggctacagagtcagttttgctacctctggcggggggaccatgggcatcctgggggatcaggggctgcctttgggccagggcccaggaagaagggatcagtcgttgcagctaaggcgtctggcaagcccaggtgttccggctcccagcccagaggccccctggtgcctcgactgcaggtggacaggaagatggagccagagaggaaagtgggctcagtgttcccctacccgcctcttctctgtccccagctcagcaacagcacgacggctggccaggcggtgactgtggagctcttcctgacactgcagctggtgctctgcatcttcgcctccaccgatgagcgccgcggagagaacccgggcacccctgctctctccataggcttctctgtggccctgggccacctccttggggtaggtcatggccatgggttccagcctccctggaggaacagacacacagaccactccagagacagacacagagaccccaagagggacacatacacagaactctcaagaggaacagacaccccagaggtttgactcctagataccccagagggacagatatcactccagcccatctgtaaataaaacgtgatgttaattgtccatcacgtgggttccctttaggctgaggtcaagcactgcagtgcgggacaaggacttcctgccctgtcctcacctcccttctctctttgatgccctcctcccactgcagatccattacaccggctgctctatgaatcctgcccgctccctggctccagctgtcgtcactggcaaatttgatgaccactgggtaatggctgaaaccccctgccctccccttctctagaaacccattttagagggagaacaagagctggaatagcatgggatgggggctcagcagcggtaccccaaaccctccacactcctcctggtcctggggagccttgggttccacccctcagatctgatgccaaagactcagtttccacgtctgtgaatgaggatgacaacagcttacctcactggcttcttgggaacagtaagtgaggttaccggtgtaacccagataatgcagtgtctggcacttagaactctataagtggtagtatttagcacttatctggtgcttagtatgtggtgagccttgttctgagtgctttgcaaacattaactcagttttcacaaccaccccaggaggtagacattcttagagtgaaaggcacagagagggtaagtaacttgttgaagtgcacacagcacttaagtggtggaatcaggacacacacaggcagtggcttcagaattcgcacccttaaccccgcactgacaaggcttccccagcagctggcgttgtcgttgtaattacataaataagcattttactagattaatgtcggggaggagaggtgcggccgcagagtgtgccgccggggcctgcgggctccgcgtgccggtgccggcgcgggtgccaagccgccctctccgctcgcccccaggtcttctggatcggacccctggtgggcgccatcctgggctccctcctctacaactacgtgctgtttccgccagccaagagcctgtcggagcgcctggcagtgctgaagggcctggagccggacaccgattgggaggagcgcgaggtgcgacggcggcagtcggtggagctgcactcgccgcagagcctgccacggggtaccaaggcctgagggccgccagcggcctctacggccccgacggacgcttgtgaggcccgaggcagaagggcccaccccgtccctcctctcccgcaggtctgaagttggccccccagcgcagagtagctgcttcctggacgtgcgcgcccaggccagtgctgtgagcaggcggggaggaggctgccggagggagccctgagcctggcaggtcccctgccctgaggctgtgagcagctagtggtggcttctccagcctttttcagggaactgggaacttaggggactgagctggggagggaggcaggtgggtggtaagagggaaactctggagagcctgcacccaggtactgagtggggagtgtacagacccctgccttgggggttccgggaatgatgcaactggttttactagtgtgcaagtgtgttcatccccaagttctcttttgtcctcacatgcagagttgtgcatgcccctgagtgtgaacaggtttgcctacgttggtgcaagtgtgcatggctggggacttctcacttccccttgcaccccttcctccccaacctgcaataaatccgcttctcctgcagtggatgagtgtgggtgccagtcctcctcaggagaaggggaagggaaggaggccactttgagagggctgaagggagggccttgatttccagccgcaatctggctcctcctggaaaatttcccccacctgcagcgctgggccccaaggcttgccaagactcattgctggaggtagagaggtgtcaaccagagaacagctcccctagacatggcctctggaaaaaggaaatctttggtggccaaagatttcctttctgtggtgagggagaacctctccaaagaggaagcaggcatatgagtgcgcacgccttcacgtgtgtgtatgctgtgtgtgcccgggacccccgtctccaggggtgccccagacccagagattagcctcccacttcggcgcagaaaacaaaagccctttgtgggacccgggcctttgtcttgggtgaggggagatttgcacctagacacttcttgaaaggagacactcagtttcacaagtgagccctcttgcccagcacacacctatggctggctgggcaaggcgctcaggcatgcaaccatgggcaccaggcaatacccatccatcacccatctcactctccccagtcctcaggcagcagcttttccaccccaggaatctctgttccttctctgtctgcctctccacagcccgtgatcccctgcttctggctcctaccactggacagtcattgtggatagagcagcctgctgctctcaggaccagagaagggaaatgacttctccaggcagaggcagatctgagtctagaacccaggcttctaaatttctaggccagtactactgctctcaaaagagattaactgggattaagtgagatgacgcatgtaaagatgctgtgtaaactgtaattcttaataccattatcacgcattactagaatcatttcattatttctgcttcctgggggaaggatgcagaaggagtctgatgctcaacatcccttacctcctttcgttgatggccaaagcaaaggagagtcctgggagcccacaagatccaggcagaaggagatgggtttggggctggccccatcctggcccagcctcttaacctcttcttaccctgaatgtgtgccctatcttttctcccacctccttcctcctaccacccagccctatccattctctccttccctctccagcctgctgtataagtaacatgtgggtcataccttgaacccccctccgcccccatgctctctgtggcctccatgccttcaagacttctgtctgtatctatctcacactgcaccaagcacccactgtgcaccaggcactaagtctctagcctctttctcccttctgctcccatccaagaaagacagtgtataaggaacatctctgtaattgtgtcccctctcatctatgctctttcctgtcttccttgaccaaagctctctttgaggtccaaaaaaggctgccctgggccatatgtgctatggagaggactctcccaaacccccaatagctagtgacagccacttggcctcactaccagaagaagggtggagtcagaaaccaaagtgacctccagagctgtcctcctggcacctgagtgtccttgctctagaggttcaaaggcagcaaggcagtgagctatgagcccagcatggatgtgtctcaggcacctcatccccaccccacctcaccccaacaaactcctctagaagaagccaagaatttctctctatgtctgtttcactttttggattgcatctccccaaaaactaaatgtgaaatccctaccatttctagcctctattgcccagattggagtcagaggtcaaaaaaggattccaagtgatggaactccaggggtggagggaaattggcagttcctggcatctcttgtgtaccagctgctgtgctgggtgccttgcatgcacggacttatctgatcttcctcaaacttcagataggttagggaaggacaaaggcccccagccatgaagggttttgctatttccaaagcttccccttatcgtcccctgtgattatctcccaaccccgtgacaaaggtagagcaaatattgttcttcccattttacagattcagaaaccaaggctaagggactggtctaaagtctcacaggtagtatatggtggagccaacacttgaactcagacctttttacacaaaatcccatgatttttccactgagacaaatcctaggctcctgggaggccctggcagaagccagaacacatggctgggcctttccagcccaacccactgtcttgcagtggacggagagccttggcgagggcagcagggtagagaggacaaagaatgtggggctggtttctgccctttaagagcacccggtcagtcagagaacagagatcacacacaccaaaccagacagaggcagggcagcatggagacaggtagacagacctccaggtccctaagctggggacagagaaggttctgagctgtcccatactcccactttgtgccaaatgactttgcacctgcaaatggtgcttcaatgtcgttttgtatctttaagctgtgatgttgtatatatacaatgcctcccagctagactgtaagccctttggggacaagggctgcttccagttcttggatggcgttctcctatctaccttccttcaactgctctgcatataataagcactcaataaatgctcatttgccaataagtactgtttcttccacaacttggcagtggtaatagaaatacagcccaaggtaccagaagacaggcggagctccctaccacttctaccccagccctcaacttctcccagggaactcagaagtccccatatcaggagaggaggggaagggctctccctaagacattcaaattccccctgccacaaatggggagacccatcactcagctcacaaaggtcccgggcattcctctggagctgccagggcagggcctgagtgcttgggcaaagagaattccgagacataatgggagtttactgtgatgacttgaggacagagggactctagtggttagagagatggaagagcctaagacacaggccctaggaaacagaatcagctgccctgtgtgagtaaccttgacagatgaaatctccttctttggcctcaccaggcccactcctgatgaccaagtctatgtggcgacctgtggttcccatctcaggtcactgtgtgaccctaggcaagtgacctctgagtctgggtttcttcatgggtagcttggaatcaaatcacacagtggaggccaattataatctctaactttgtagattatattctgaatctctaaaatggcaagaacaaggtcttggcctttatagtccctcattagttcaaatcttcaggtcggagcttcccctggcagccaagcctcttgtgagcacttgtgaatcctttcattctgagatgctggagtttgagacctgtggactatgaagacagtgcctggggagagaggatgagaaagcaagtgaaagggtgcgaactggaggcaagttcagcagcaaaggagcctggcccccaatggcctctggggtcatcagggtcattgtccagcccaagtcccaggcccagaagaaaatcctgcgtacaactggcatgtacagctggcatgattggctggggacaaagcgctgggacccatggaagaaaggacagactgacctccggccttaagaggagagacctgggggaggagctgctccagcaggaaatgccagagctgggcaggaacaatagcggggtttctttagcccttgttttctttggcatcttagctgccacagagcccagagcccgctcctccaagtccttagcattcctgcaggctcctcccctcagccctgcctgacaaactgacagaggaggcacctgttctctacttcctctgcaccctcccgctggactcttccccctagcttagcaccacactaaaccctcaaggggcttttaaaattaacagtcacaacgtaaggagactttactgagccttactctgtgccaggcactgtgctaagggcttctctaacacacatggggatgggagtctttaatgcagctcctctcccgggatcctgggggtgggtcctccccctctaagccctagagagccctccagcctcgttctccacatgcccgacctggagtgggtgggaagagggagagggtggtgtgcgaggaggcagcaggtcacaaaggggttacaagctcagagggaagggggatgggaactggaagaaagtgtcacccagaccaggggtagaagaacttgactttggggagactgagaaagaccacatgtaagagagagagacatggaaaatgaggtagaaacagacagaaacaaagaaaggcacaaaaattaagaggcagaggaaaggtgaaaatagccaggagacagaaactgcaggatgagagaaatgaatagagagagacagagagactaagacagcaaaaggcaggaaggaaaaacagaaaatgagaaggtgtgagagagagagagatggagaggtggagaacagagagactgaaatgagaaagagacctctcggagagagaccgagaggaagaggctggcagagggagagggtcagagaccaaagacagagacaaaaagagaaatagggttttgcaaagactgactgacagaaacagatttcgaggggagagagatcaagaccaagtgagggtttgaaggagacttaggggaggtggaggaagagaaggagagtcttagatccagggtgaggggcttctagcaggaagagggaagacgccaagaccgcgcttgggaggtcagtggtgcgtctctaccccccctgctcccccactccaactcccagagtctcaaggcctcacgtcacacccccgtcccgtcccgtcgacaaggggaaccccggcctgggagagggcgcctccggggatccgttgcctagtccaggtactgcccagctaccgggcgtcgaggattgcgaagcgtcggggcaggctggcacggtgcccacttttcccaaaacgccagccttccaagcccagaagctcgcccggcccaggccgggagcggcccacgtcggacggccggaccgccctgcaggacccagcccggccgcccgcccccgccgccggcggtgagggaggtgagcggcgccgacctgcgggacgagcatcactccgacccagccgggggtgaggcgggtcaggatgctccggtcgcaggaggaaaaggaggagctggaccaaaagcccgaagagaagaaaaggggaaggccgcgcacggagcgcggtaaaggccggcggagctagacgccccgaggtcggagtgaagcgccgggaccgagccccgtctcccagggagtccggggcgcacggcaccgaggagagcgcgggagccaacctgggcgcatcatgcgcagggcccgggacgctgggccggtctacaccgccgcctgggtcacgtggcccggacgggccggcggctgccccggccggggggcgggggtcgcgccggggttgcgctggacgacggagagcggcgggcccgcagcggcctggagcctcccaacccgcgcgccgcgctggcccccgagcgtaggagccgccccctgcccccccgcgccggccccgcgcccggccgcccgccccctatatagcgcgccccagcagggcccgcgccaggccgccagcctcggagtgggcgcgggacagtgcgcggcgccccgcagccaggcccccgcccccgccgcatccacctcctccgccgcctgcgacccaacgggcgccccccgccgcggcagctgccgccgggcccccgcggccaccatgaagaaggaggtgtgctccgtggccttcctcaaggccgtgttcgcagagttcttggccaccctcatcttcgtcttctttggcctgggctcggccctcaagtggccgtcggcgctgcctaccatcctgcagatcgcgctggcgtttggcctggccataggcacgctggcccaggccctgggacccgtgagcggcggccacatcaaccccgccatcaccctggccctcttggtgggcaaccagatctcgctgctccgggctttcttctacgtggcggcccagctggtgggcgccattgccggggctggcatcctctacggtgtggcaccgctcaatgcccggggcaatctggccgtcaacgcggtgagtgccctggggggggggtgggagcctcgaccctggggtgggctcaggaccaggcctcttaccccacctggaaaaaaggggtgccgcagagtgggccagcccacacccttcaccaggaaggcaagagcctcccaaggccaggaaggcaactctccaggctgatatgtgctcccttcctgcccacctcctctccccctcccctcatgctggcccaccctggtctctctccaatgcctgctacccctcctctcctgccagaaacttctgcctcctcctgtctcacctttgagctccaccttcctcctgggcccctcacctctcccatcacctcagtggagcggttgagtagaaccaccagagaaaagcgggctgtcatcacggctttgggtgaccctggcctgtctgtgcttcattgttctcagcgcctccatggggatggttgtgtctgccacagcaggtgtcaaggggctcacatttagaaaccgtagataggaaccccctaatgtggggccagtgcagagcagtttctgttgagtattggttccctctttccccaacctgtgctcctcccctcaaccccgcacccctgcctccctcccacctcctgcagccccagagtcagcccccaaccccatgcaaactgggttcattaatcaaacacagaggaggatttgcttggccattgtcaagctgtgagtcagccgcactggagagacgggtttaaggctggcactggcatggggccaggcacgggcaggaggccgggatggggtgtgaggcaggcaaaccgggcagctgcccacaggatggagggtaaatgccagcttatgggggctgggggttgggcagagccattgataggcccgtgtccaggaaaagctaccctgacgctctgccctttggccacaggcctgagcttcaagcctgtgcaaactatgaaatgtacagtgtctttaacaaatggcttcgctggggcgatgtccacaggacttggcttccaggtgccaaggtgctctaagtgtccctggaggccaaaagccctactccccgagcccctggctatacagccagaaggtggccggggtcctaacccgctatccccttgcagctcaacaacaacacaacgcagggccaggccatggtggtggagctgattctgaccttccagctggcactctgcatcttcgcctccactgactcccgccgcaccagccctgtgggctccccagccctgtccattggcctgtctgtcaccctgggccaccttgtcggagtgagcagtaccgacattgggctggggtgagggtggggcaggcactcaaggcaaataatggagccctggagcggagcccacttcagatggatgagtccagcagagtttaaggcctggatttagggctcctggactctggccctactgggccccagaattgatccccccaaaacctctgggctgaggaaagatgggagtaagtaggaggtgggatgggacaggaatcaaacccaacctcagagcagagaagagaggagggcgtagttaagggtccatggttaaccaagcagctgggatccttggagggagaggttgccagcctgagtttgagacctggctgagcccctggactgcagtgtaaccttgagagagtccagattctgtgggagtggaccaggatgttgcctttctctccaccgccctgtctctatccagatctacttcactggctgctccatgaacccagcccgctcttttggccctgcggtggtcatgaatcggttcagccccgctcactgggtgagtctgtcccttcccctggctccctggagatgagggcctggagacccagcagtggcagctcagagctcaccagacctggattctgtgggtctagagcttgggggtgggccacggagtggtggctgacagagaaagggacacagtaggggatgggattcagctagaggggcagaggtggctttgtatggcctgaaccgctggggacagggagtctgagtatctatccgcttatggaagaggctctactgaacctggaggtgcagaggggctctgtgtcaattcccttgaggatttggtgtccgtccccctcggtgtctgcgtgctggtcctctctgatgttttatttatctgtccctgttgagggggttgggagagtcttcctgtgggtctgtccctgtggacagtctgtctgccccccctttggaagctcatggtcactctctccagggtctgcttctatccctgcgtggaggggacacgcgctctgttcatccgtctctctgaggacccacgtgtcccctctgaaggtttatttgcttctctttccggtgtggttggagggagcctgtccctctgggaatctgtttgccttctttgagggtctaggtgtctgtggtccatgtctctgtccctgggagtggtgtgtcagtatattcgtccccgaggtgggaggaagtctttctccctgaaggtctggaagtctgcatgtctgtctcctctcagggtccgtgggtctgtcctctgtggggtggggggcatgtggtcttcaaggtctggggctcagcgccctgactcctgccctgtctccaccaggttttctgggtagggcccatcgtgggggcggtcctggctgccatcctttacttctacctgctcttccccaactccctgagcctgagtgagcgtgtggccatcatcaaaggcacgtatgagcctgacgaggactgggaggagcagcgggaagagcggaagaagaccatggagctgaccacccgctgaccagtgtcaggcaggggccagcccctcagcccctgagccaagggggaaaagaagaaaaagtacctaacacaagcttcctttttgcacaaccggtcctcttggctgaggaggaggagctggtcaccctggctgcacagttagagaggggagaaggaacccatgatgggactcctggggtaggggccaggggctggggtctgctggggacaggtctctctgggacagacctcagagattgtgaatgcagtgccaagctcacaggctgcaagggccaggccagaaaagggcgggcctgcagcctgcaccccccaccttccccaacccttcctcaagagctgaagggatcccagcccctaggtgggcagaggcagaccctccccagagctccttaggaagaagacagactggttcattgaatgccgccttatttatttctggtgaggatgcatgcgtggggctgctggtgtttagagtgggggctacccaataaatcactgatactcacgttccacctctgtctctcctcagagtgccttgagacactctggcccattgcctctcctctttgtcatcccacatcctccaccacgatctccacagggtaccaggggaccccaggacaagtgctctgtgggaagaaagggagactgtgaccatgggaggcccagagaatcagagagatgggaacagagcagggagagactgagagaagaccgaatatcaaaatagagctagaggccaggaaggaggggtcctcactgcagtcaccctccacccctccccctcagccatgtcaatcaagtccctgccacttgaggagggcttggctggcacttgaggggagtaccagggtgtgacaggcagggcggaggagtgagccaaccgcagcccctcgagatggcaagggggtgaccagccaggttccatcacagccctgggctcgtttctctgcaccttggtctttcaaaaaggtgtcctgctgggagcctgtgcccagagggagcagccccccgacccccccagaagccacatgtggcccagcccccttttccagggcttctcatgccttggcccaccagtgtccccaccgtcctctcctctgggcctgagctctgtcctagcctgctcttgtcccactgtcactgacactccttaggtaacctccttaaactctcagagcctccctctcttcatctgtaaaatggggataaaatatcactttcctcacaagatagttgtggggaccagatgagggcatgagatgcctgggaccagtcagctttctgtgaggaaaaggcggggggtcatgcagtgaacagctccgcatagcccagcttcgcagtgagcccagcctggagtcagtaactaccctcattccaatctggccgtgaaacttggggcaacataagctctctgagctttaaggaccttatctgcaaaacaggggtacttttcccgacctcatgtgctatgtgctgtcgtgaggagaaaatgagaccacgcctggaggtaaaacgcttgtacaaatggtcaggcgccttggagtgagtgctcagtatagtcgtgttaatagaaacccacacgtgcctgcctagtctgaggccccagccacatgcttctgccctcctgggggtgtctggacctgagcgcctgtccagcggggccaggagacggactgagaaggggtaggggaagctgtagttcttggccagcgagaggcagtcccaggggctggggtgaggagtggcagaccccccagccttctccacacttagagtctaagcatctacaagtgagaggtcagccactcatgtccgccccataggcttacagtaaacaccacgtggcattgcgtgtgagaaccccgggagcccagggaaggagcagccccccacccaccgtgtcccttcccacttcttccaacctgccccgggctgggggagccgggctgcaagtgccagctctggccagcagagggcgacgtcgtccaccgaatccacagcgtggcgcctcgtcgtccacaagtcctgggtctgggctctagccagatgggggtggagtggaggacacagggagtccctcatgcttgagtcccctggggccaccttgaggcagcctatcccaatgcatccccgccccgctatccgggtggggcgcagaagagaggggagcccttctccgctcagtctccaggagactcaggtacagacacagccatgaccaggaggatgggctcttcctccagcccaatgggggccacggcagggtggacagtggacccttgggagacaaacccgcgggggcaggcaaggcactaagtcagagggggctaccggccctgagcttcctgcaggttgcctcgcctggcccttgggcaggcttccagctagggcttggggctgacaagcgccgtggttggggcggtgtggccagcaggggtcgctgtgtctgcgtgtcggatcttgcaggagcggcaggtctgcgggctcacaaagtcccgtgcacacgcgcgcacacacactgaccccacacagtccggggctcgcggccacacactgacctcagtcgtgcccgagggctgcatgttccgggtgtgtgcgtctcctttcctccgcacgttcattcgaatgtgcagagccacatcagccctcctccagcattcgctcacagggccaccgccggccccaccgcgggcccagacctatgagcctggctccacgggttctcagaggcacacctgtgtgctgtccaacgcaagcacacacagtccccgtcacctctgctgcacctaaagatggaacccagggagagtctggattctcctgtgggaggctcccttccccttcctccctctcttcctctccccagggcctgccagttctcaccagctgggaggtggacaaggtgatatggggagagatggaagaggaccgggaggagaggtggagagcggacagaggggctggctgttgagatgggtggacaggaggaaggacatctgggaggaccaggtctctccgctcctcttggcctcatgtgtctccgtcatgtgtggatgaggacatcagacctccctacctttccaggttttgtggggatcactgagatgaggcacgggaagccatcttgaattccctccccatcagtttgtgttctccctccttttctctcccggtaccttcctccttcccctccccttcgccccccttactttccccaatctctaataggacttcagtcagagctgcattgacaggcagccctaggcagccagataaggaacctcggcaaaaggtttttgagcatgaatgagcttaaagcttggcactagagcccagtgctggctgggttcgggcacgtgctggctaggacaggaagccaggcctggagcaagccctggtcaatggctacctggcctcaggaggtgaaggaccttgtcccaggctgggcagaggtcaggagactcagccccgagctagctggggacaagggctgccactgcacttagcactttcaggctccaaggcccagggcaggtgctgaggtgcctgtcttggagccgccatgcagccccgtccccacagctgtctaacggcagggggcagggaagttacaatcctaatcattcacattttctgacttggaggccctctcctaggtatcagcacatttactcctaactacacacagggaggagggaatta

SEQ ID NO: 342 - DNA, 48583 bp, Homo sapiens
tttgatcttggtcaaaaatagtggcttggaacacagggcaactgctaagagtcttttgtatttaacatgggagtcacaatcacattcttttttgctaccctttcagatcagatttcccaggttagagggttctctgttctgatgtgccttctcctttcacttgccctgacacaggcacctgtgcatcagtagtcacaatggaccctttgtcagattagggttggagccctgtcggccccatctccccaggaatgtcttttgcagggtgccctaggaatctgtgaaaatgaacgcggtgatgggaatagagtaatcctctcactcttccaagtgtgttcactgatgtcatagattcattagctatggtaattactgtttctgagtgtctggggaaaaacgcattctccccactgctgggagtgtgcagtgattcagacattttggaaagcacttcagtagtatcttacaaaataaatgtgcacctaccacatctattctttattgtgtatctgttatctattatataaactgttagatatgtaaacatatgatgttcactgcagcattacttataactacaaagctctgaaaacaaactaaatgtccatcgatatactttggaatccttcaaagcacttaaaaaagatgagaaaaattataaacagtcacatgcaaagagctccatactgttgaatgaaaaacaaaagctacgtgtagtggcacatgcctgtaatcccaacactttgggaagctgaggtgggaggatcacttgaccctaggagttcgagacccgcctgggcaaaatgatgagaccttgtctctacaaaaaaataaaaagaagcagcgcatggtggtgcattcctgtagccccagcaactcagaaggctgaggtgagaggactgcttgcccccaggatgttgaggctgcagtgagccatgattgtgccactgcattccagcctgggtgacagagtgagaccctttctcaaaacaaacagcccgggtgcagtggcttacgcctgtaatcttagcgctttgggaggctgaggtggatggatcacctgaggtcaggaattcaagaccaggctggccaacatggtgaaaccccatctctactaaaaatacaaaaattagttgggcgtggcggcaggtgcctgtaatctcagttacttgggaggctgaggcaagagaatcgcttgaactggggaggcggaggttgcaatgagcccagatcgtgccactgcactccagcctaggtgacagagtgagactccagcgtaggtgacaaagtgagactccatctcaaacacaaacaaacatgaacgcagagccaaacagagaatatgggtaagaggttacctctggggaggggagtggaatttcgaagagtgaagtaaaggggagacttctgtttgttaaatgttttatcaaaaaagataaatatattatttgcatattttaaagaaaattttaagataacctagctcagtggtttttaaatgattgtacctgatgagacagataaagtgtcaggtagctcagagataagatgagctgataaaaacagatctaatggaagcttaaggtgctatctctgcaaacaagtctaagtgaaatcctttattttgccgtacatggttcacataactttactagtcaaaatttaaaattactattaaataaagtttgtagcaatatctaaagcaaagcatgaaaagataagaaaatatttcttctaaataaatttgtcataggcacatagaccaaaggaatagaatagagaacccagaaataaactcaaatacttacagccaactgatcttcaacaaagcaaacaaaaacacagtggggaaaggacacccttttcaacaaatggtgctgggataattggctagccacatgtatgagaatgaaactggatcctcatctctcacctgatagaaaaatcaactcaagttggattaacgacttaaacctaaaacctgaaactataaaaattctagaagacaacattggaaaaacccttctcgacactggcttaggccaggatttcatgatcaaaaacccaaaaacaattgcaataaaaacaaagataaatagctgggacctaattaaactaaagagcttttgcacagcaaaaggaacagtcagcagagtaaacagacaacacacagagtgggagaaaatcttcacaatctatacatctgacagtggactaatatccagaatctccaaccaacccaaacaaatcagtaagaaaagaacaatcctgtcaaaaagtgggctaaggacatgaatagacaattctcaaaagaagatatacacacggccaacaaacatatgaaaaaatactcaacatcactaaagattagggaaatgcaaatcaaaaccacaatgcgataccaccttactcctgcaagaatggtcataatcaaagaatcaaaaatggtagatgttggcatggatgcagtgagcagaaaacacttctacactactggtgggaatgtaaactagtacagccactatggaaaacagtgtggagattccttaaagagctaaaagtagaaccaccatttgatccagcaatcccactactgggtatctactcagaggaaaagaagtcatattcgaaatagatacttgcacacacgtttatagcagcacatttcacaatcgcaaaatcgtggaaccaacccacatgcccatcaatcaacaattggataaagaaactgtggtatgtgtgtgtgtgtgtgtgtgtgtgtgtatatatatatatacacacacacacacacacacacacacatatgatggaatactactcagccataaaaatgaatgagttaacagcatttgcagtgacctggatgagattggagactattattctaagtgaagtaactcaggaatggaaaaccaaacatcatatgttctcgctgatatgtgatagctaagctatgaggatgcaaaggcataagaatgatacaatggactttggggacttggggggaagagtgggaggggggcgagggataagagacaacaaatacagtgcagtatatactgctcgggtgatgggtgcaccaatatctctcaattcaccactaaaaacttatgtaaccaaataccacctgtaccgcaataatttatggaaaaacaaaattaaaattaaaaaaaccttacacttgtattatcactattttggcacatctacagatattttaaaattttaaagtattttatacagaatgatacaccaaataacaattgctttggtcatgattctaataatccactttaatttttttattagcttgtgtatattttatttttttgagacacagtctcgctctgttgcccaggctggagtgcagtggcacaatcttggctcactgcaacctctgccacctgggttcaagcgattctcttgcctcagcctccccagtagctgggattacaggtgcccgccaccacgccaagctaatatttgtattttagtagacatggggtttctccgcgttgcccaggctggtctcgaactcctgagctcaggcgatccacctgcctcggcctgccaaagttaggattacaggcgtgagccaccatgcttggccgctcttgtatatttttaatgctagatttgtcactgttcttacgtagctaagttgaaaaaagaaatgcaagttaactaagcacctgtactcagcccttgaaatcttggatccagaagaacagtctatcaattatatgattaaaaaaaataagaactataataacttttcctaaacaaccacttaagatttttaaaaatccatcatattagcttttagcatattgagaacttaaggagatgatagggaaatatttttaatattattagattattttggctatagcagattttccacatggagaatgattttaaaaatattaatttttatctggtctataagacagtagtattattcaatacatattaatatgatcgctatagatttctatattcttttggttaaaaaacccagtcaaacaacaaagggctgtcaacttttcacagtcccttgtctttgacagccctaaaaattttgcagatatcaaagatctttcatagtgccttacttccttcacattttaaatataggaaaactgagtgccagagacaacaccagaacaagtctcaagttcatcttcccctatatacaccattgctcattggcaatgaatgtaataacttaaaaactactgcatatgtgtctttgacagagacatatacacacacacacatgaatatgtgtgtgtgtatatgtgtgtgtgtgtatatgtctatatattatgaagtcagtacccttgaaagcaaacaagtgaaaactttacacattgttcccacccagcaactgtaacaatcagaaacaaaaatgtaatgaaactcaactactgaaacttgattttctatagtaagacagtaaacttaattctttaataacagagccaatcactgggtgtttgctttaccaaggaatactttttctcagtaactaagatgaaaagtcttacttattccatttggtaatatgtatggtccattgtaccgagcaggtgaaaagcaagaactggtgtatgcatcaagtaatttccccttggttatggctccttggcataaggcgatttcactcacccacacacagccttggacatgcatagccttgcagttgacttcttagaactgctacttcttataatattttgaaataatgctatcaaccctgcctcattatttcatatccacaacatgggaagagcagaatttgtgtaggccactagactatcatagagcataatgtaaatgtctttttttttctttttaattgagacagaatcttgctctgtcacccaggcttgagtgcagtggcgcgatcacagctcaccgcagcctccatctcccaggctcaagtgctcctcccgcctcagcctcctgagtagctgggacacaggtgcatgctgcaaagcctagctagttattttttgatttttagtatacatcaagtctcactatgttgcccaggctggtctcaaacttctggcctcacgtgatgctcctgccttggcctcccaaagagctgggattacaggtgtgagccaccatgcacagccttactatgtttttctgacattcagtgagggttggcattgaactcaggtactatggtttcaaatttaaacatatttactgtaaatctgtgtgtgtgtgtacaaattatatatatatgtgtatatataaattgtatatatgtatgaaactccatctctactaaaatatacatcatattttgtatatgttatacatgtagaaactgtcatttgcagctcacaggccactttggaggcatcttggctacctgcccgtgactgcccaaactgcatgtgctttctgccaagtagagcatcattttgaaatacttgatatgaaagttttgactagatttcacccatgcatgtgtatgactaacaaagactacaatggttctgacgagtccaaccacacctgggtgtcggctgctactggattccctgcgcaactgagacacaatttaaatctagatttatcaagctagaggaatccttagagaaaattggatctaaaccctcattttacaaaggcagatatggggatgcaaggagttaagtcatgtgtcgctggtcacccaggctggtgatgaagcaatggaaacaatgtgagatttgttaccttttggcctgtttgtatgtcccagtacatactgaaaaggatagtgtttgtaaacgagaggggatatatggacttggtgaaaaattcattacattttctttatattaattatgaaatgtctaagtaatgaacagaagataaagcatcaggggagatattacacataaaaatgcaaaactatagacttttttttttttttttttggacagagtttcactttcttgcccaggctggagtggagtggcatgatcttggctcactgcaacttccgcctcctgggttcaagcaattctcgtgcctcagcctcctgagtagctgggattacggacgcccggcaccttgccaagctgattttttgtattttagtagagacagggtttcaccatgttacccaagcttgtcttgaactcccgagttcaggcaatccacccgtctctgcctcccaaagtgctaggattataggcgtgagtcacagagcccggccattttcttaacgtgtttttataacctattttctatttgaaattgttatacacaattcttggccgagactttatgatctcctcaaatttttgaaaaatcattaaggatcaatttgtatgcctaattgagtgataaatttaaagcagtgttgtacaagcattcaagaatttacagaaattggaattatatttgaaaactaatttttatttaactttcattgatacatgtactactaaattatcttgggaagagttttgaattcaatcaaaattgccatatcggccaagcatggtggctcacgcctgtaaccccagcactttgggaggctaaggcgggcggctcacttgaagtcaggagttcgagatcagcctggccaacacggtgaaactccgtctctactaaaaatacaaaatttagctgggcgtggtggtgggtacctgtaatcccagctactctggaggatgaagcaggagaattgcttgcacctgggaggtggaggctgccgtgaggcgagatggcgccactggaccactccagcctgggcaacagagcatgactctgtctcaaaaaaacaaaacaaaacaaaacaaaacaaaaaattccaatgaagtattttaaaataacaatgccctattttgcagaaagcacttgaattgttaacaacagtcataggcagccagctgagatgcctccaaattggcctgtcagctacaaatggacacagtaatcagatacatgtgaagtgaatgtttgggatgctgcctggagctgaatccaccaggagaccgcagtgcctatgcgcctccctcccacctctgcagcagggctgtgtgcggcattctgcgcacctggaacataaactccagttgtgccacaggccgcttgtctgtgagatctgcaggccagctgctattgctcaaccttgcaatgggagcaacaagttccaggtgttattgctgccactgacgaccgggacgaccaagccaagtttgggtcttggtgaaaaacaattgggggggcccccagtgagggctgaatggttaagtttccttatgaggattttgtatttgacagaggcaaaacctagttggcccaggtctcttctggtccacagggccagtgatttttactaactttctccataccttgcatgccccacacctcccttcccagcctgtgagaacacagagggatgcagtctatcccactctgtctgtattagtccgttttcgcactgctaagttataaagtaaagaggtttaatcgactcacagttccgcatggctggggaggcctcaggaaactgacaatcgtggcagaaggcaagagggcgggagacgacgccttcacaaggcaggagagaagcaagtcggagaaccaggaagcaccacactttaaaaccatcagctctcgtgagagctcactagctatcacgagaacagcatgggggaaaccacccccatgctccaatcaactccacctggtccctcccttgacaaatcgagatgagatttgggtgaggacacaggcccaaaccgtatcactgtcccagtctgcccttcaaggagccccagaggaagcccgggctgtgggaggcagcctggaggctggtatgcctagaccctgcccagctgccccaaagctgcggccctgtgaagggcctgagattttaccctgcttgcaagctaatgacctagcctgccacagcttcctggatgctggcagactcctgggccaaaggcaaaggactgtattgctctgggaatgccatttgccccccaccccaagtcccccaaggaggtgatgtgtgacaacccaatttatgatgtatcatctgtatcacagctgaggaaccccaagctcaggaaacccctcgagttataagatgggctgcttctccaatcaactcatccaacctttgccctacaggtagatgatgatctttattaccgtagtcaggaaacaaatctgtcctctgcctagacaagcatccttgaagatgtccagaactgccacagagaattgcccaacgcacaccagtctagcatcccctgtgccacctggctgggaaacccactttatcaacataagagggacagagtgccctagggaaaaagagaggactgattttcatgtgagctgagcaacctccccaagttgtgaaggttgaggagcccagccacacttccccaggcttgtagacggggccagcatgcagctcggtgtggtctggagcctgctggtcacatctgtcatatgtgaggctaagctggcaagtattttgtaaattgtcaccaataaacaaaaactatgcttcactttgtgagactaacttcaataatgactgtgtgaggttttatagtgactttttataaatttctgaactattcatatttttcacgtactcctgggtcacagccacagaaagactgaggagctcttaacgcattccccacaagctgagcacgattcagactcagggtagtcaaaaacaggtgacctgtcagctcctaacaccaaagggtttctgatccctatgggaacattaataattgacacagaacaagtagaaggcagtgacacagtggtgtccaggctcagcagggtggcctggtccatggcagcagaagtgtgggtctcataggacagagctgtttctcaatcctacttgtaaagtcaagaattcgggtgtcataagagcgcaggagttggacagacctggctaaaaccctggctctaagcccttctgttaatgcaactttcagcaagttacttccatggctggcaagtgtgattacaagtgataccggggtttgctgaggaggtaatctaggtcaagcaccttatcaatcacaaggcctggtacataaatggataagcaagagctctaattaagatgagtgactgaggagctcgatgtgtgaaggaatacaggtaggattcagccttccattcacaatcaaactcccgaaaacttggcagggaaattagatggagcccatggtttggatccaacctggaccttatttttttatagtatttctaaaaatagagtctcattaatgtccaatggctactaagttttgtcctctcaaaattaaaatagcacttgccattatccagtaggaactacagtcagcattttggttaatatcctcccagtcatcttttgatattctagatgtgtatctagttatgcataagtacatatataaagtgttatataaacaggctcatcctgtatatcctattttaaaactgctttaccactaaacaattacttcctaaaatcttaatacctgttatttcttgtaaactttgatttactccggagaaatcggtctgaaacaattagcatctcacctctttactatcaggcatatcaaaggttattacattaacaaaaaaatacatcaagttgacctgacttcatttatgtaagaggtagaaaatctgagtaaagtttttttttcattaattaaatcctattttaatgtaaatcctcttataattcctcgtttcactaaagtaatcttggaatcactaaagttttgtggaagcaccacctatctgggggaaaaactgcctttaaacacctgcaaattgggttgatagtatctggttaagaggtggtatcagtcatgtaagagtaagattgtgaccgtttagtcatatttaataacccacttacataacccttgttatttaattcagatacgatgttcagcttgtatttcttgataataacccccctcctccaaaccaacacagatgtacacacccaatcagcgtgcatgactgctgactggcactctttccagtgactgtttattgagtgtcaggaacacaactgtgattatacaaaatgaagtggacaaacggtcttgcacaaatgacgtacatttcacagttaatcgtgaaggttagaaaggttaacaagttctattagtacttttcataagcagtttgatttctgaaaaatacagtaacataattttagtaactactaaaatttctttaaaactccctatcaatctgaagaacaaactaaaaacctgtttattacatgaatgctacttatgagaatttaaaatatgggttcacttcctattttccacaagtctttgacttgtttatttactaaattaacagaacgtgggatgcagttttttaagttagcaacttccttagggttactgggaagtagagtaattatgaaaaagggaacacttcaattattgtataaaagattgctttgcatactgattacttcttgaaccccaaaaagtgctatttagaggcaagggcccattttgtgcccattaaaagaaatatacaggtgaatgtctgtctcatccctctaatcatatgtaataaaattatatcgctgtcaataacagcaaagataatgatatattaattttaacagcagttagaaccagaaggaaaaggctgttatacagaaaaacatacaaatatgtaggtagaagtgaaaaactgaagaatgtggagtgtttactgtcccgttactcacacagacgtgctggattcaacacccacgctgaatctccatttattccacggaggtggagttcaccatggttcgactgcccaccagatccccaaatgtcaaagtgaaacaaaactcagtgaattctagatgactgttttacttcccctaaagaagttatctgtaaataagaaaaatcaactgatagggggaaaaaaaaaagatctgtcatttgtcaacagatggacgaagacaagctattgactcaaagagaacctgccgcgagtcttagtctttggaaggtcagacagctgcagtgttcggtcacatggagatggtgtcttcatgtctcagaggccgcattctgtaggccagacgtgtgctcaccaacctatacaagggtcagggcagtcccgcaggtaagtttcgaattgacctttggtaacatctatcaaggttgtgtatacggtcagctgaaagaaaagttatttttactttaaggacgttttcaattcagagatgttctgatatatattagcatttctatacttgtagaatttgctttagaagttatttaatattaaataatataacttaatatatgcaaagcatgttatataatgtatatatttatattaatatagtataatcatataaaattagctaaagtctcaccaaataactaaagcaaacaacttcaacaggatcactgtttcaggtaatgaatataaacaggctcaggaaagaatctccagctccttataggagcttattcctgacagcacattgctccacccccaatgctttaagactgccttaaccctccttgacgcacagctggcagtcctgggagacctgccggtgtcctatggagtaaaaaccgtggagctttggctatccctatccttaaagcatttccaatacagtgggggaaactgcaggcacccagatcacaaggcacacacccaaacacaagtcacgagattgtgacttgctcaaagatggtataggcaaaacgcaagtatggcagggcccgtgaactgaaggcaggcttcctgtgagagccagggtgacctggatgctaaaggccggagggatttgtcctggcagggtaaaggcggcatgtttactttagggagagctgtggagaaggaccaagaaaagaaggaacaaatgggaaaattaggggggcatattcagaacgttcagggaatgattgttagcgagtggtgggatgataggaaactttttgcatttttttaaaactacagtgtagggaaaagataaacagatgtagtaaagtttaagggaaacccgaacccaccaagacacagagctctgtctgaaaatggactgcagactttgttttgttgacatttaggtgttagttatatagtgtgagatttttaatagataccaataagagtaaaatgctagccttaattcaaatgctatgtaaataaagctataaacaatattctgacctatcaagcctcagtgatcaatttctttcttgtattccaaaatacagttttagccacacaaaaacattttttaataaaaaatcagtcctaagctgaacacaccttttgtgctcaaactgatcaaagataacagagaaagataaaacatagggccaaattctttccctaaaaggcaaatatacatataacatttaaaataccttgttgaggacaggttttgttgacaggacatcatacatggtttcaaatgagatattctaaaacacaagaaaatagttttgttcagtaagttaaatacagaagccaacagccttatctacacacatgggccaccagaaaccaagacattctttaatcaacctcccctccatccccgcagtggagtttctgtgggagtcactgttagaaacacaggtaacagttttaatggattactttcctctctctccttccccttttttaaattcttgcctgtttgttattcaacttcagagtggtatccagcattagaaccagaaaaggaaagtacagcacaattttgctctttaagttaagaaaacgaaacaaaaaaatcagtggagagtggctagagatactatgaaaaataggacgtttataaattacttgaaggccaaagaaaaatgccagaaccaagggaatctttaatggcaacagtttctttctatagatgaccctgcaaaggtacctcttggctggtgcggttcagacacatctttgcaggcgttctgcgatcatcaaggaagaagggatgtttccaacggtcataatttgtttgtaccacataccatctaccctgcttagcatcgagtctagatacaaaaggagagattccctcttaggctacatgccttaaaactcaaagtatatcagtgtatgcttttgtttctacttcttttgctttaacaaacctacttactcatatacatccaatgattcctttctgtctcgtgtaatcacacaaccttccccagactggttgcctcccaggataaagtaggctggggccaatatcttggtcttggtcaataaattcttggcttcttcataactatatagaaacatttaaaaagaaaaatgaaacttttttttaattttagtaaataacttcatttatttttaaattttactttaagttctgggacacatgtgctgaacgtgcaggtttgttacataggtacacacgtgccatggtggtttgctgcacccatcaacccatcatctaagtttcaagccctacatgcattaggtatttgtcctaatgctctccctcccctttcaccccaccccctgacaggccctggtgcgtgatgttcccctccctgtgttcacgtgttctctttgttcagctctcacttatgagtgagaacatgcagtgttcggttttctgttcctgtgttagtttgctgaggatgatggtgggaaacatttttagatgacttagaacggaaatgtttagctctgtagaaactaaagaaaaacaagtatctaaggaatgtgttatttatttatttctatttttagagatgggctctcactctgttgcccaggctggtctcgaactccttggcacaagcgatactcttgccttcgcctcccaaagtactgggattacaggcatgagccaccatggccagccacaatgtgttttctaaaaaaggatggtgagcaatgcctctgggaaaagcaatccctgaccctgtatggtgaacactgagatgggaagcgggaatcttaggaagcccctctaatctgaaggagaaacaaagtggcctcaagagatcatcttccacccttactgtccatgcctttcactcaacaacagaacaaagggaaataatattacagtatgtaggacttagagaacagaaagtaaaccttcttgaaaattaggactattaaaaattgaagtgggttatcaaagaacactactaacattaaatcttattccctgggaagtattaaaaataggattgatgcccatttatttggacgcagtgctggctgaatgaaggaaaggcagttttgctattgtaagatttctataccaaggcaagatataacttacaggttaatatgtagtacattttgtatttatttattttgtttttttaagacagagtctcactctatcactcagggtgaagtgcagtggactgatcccagctcactgcagtctcgacctccttgggctcaggtgatcctcccacctcagcctcctgagtagctgggactacaggcaggcacgtgtcaccatgcctggctaatttttgtattttttatagagacggggtttcgccatgttgctcagactggtctcaaacccctgggtgcaagtcatctgtctatctcagccacccaaagcgtgaggattacaggcataagccactgtgcctggtctgtactaccatttaaatgaagattttactgtatgactgttcttttgtgtgtgggtcattttttttctgtacaccaaaaatattcataggtgcctttcataatgtcagtatccctagtgctttttaagtaattcatttatttgctataaaacacacagtctgcacgaagaaaacatgagtaattccacatgagtgtcagaggttcacctaagaaattctgcaatagttcctcaaaggattaagctggagcttgacaaatatttttattttttaatatgagtaatttaaaataaatatttaatagtaaagcaacgaaacactttaccttgtgctattttccagaactgttctagtgaggaaccctatccacatgacatctttctttcccagaatccattctagaatacctggaagagatgaacacaatgtcaggaaccggaagaggtgacactatgtaaccagtcaggacccggaagaggctggactatataaccagtcaggaaccagaagaggttagactttgtaaccagtcgggaaccggaagaggttggactttgtaaccagaaggcacagtccagccttcctcataaaaaagctctgagattcccatttcacttgagaatgctctacttacccagataaccaccatttatactgaaacgttcattcagtgtaagactgaacagtccctgagaaaaagacaaagcaacgaagtcagaaacatcaaccatgcgctttaaggccctgtcgctcactgtacttcagagtgggatataaaggcctagcttgggtaatggggaaggcaaaaataaatcaaaaccataaaaggctttttaaaaagttcaaagcatttttgattctagtatgtgagataagtaggtggggtatcactggcaacgctttttggacaggaaactgaagggcagagaatgaacgcctgacttgcctaagtgagcggaagacccaggactagaaatcagattgtgactcccagcccttgacacccagccacatgctctttatcccagaagaggctcagaaacctccgtttcctttctactcttctctaccacgagatctcatacctatgaagtgacaagaagtacaagggggtgaaatggggcttcatattccctttaggtcctcatattcttagatttcaacttttacataacggtaacaggacagaaggctacctgtataattatgtaacaacagactccttactggtttgaatcctgttaacatgcccacatagccagcaaagcttgaagccttgaagacagttttgttgtttctttggaaatccaaattcactgttaaaggttttagttgctcagttatgacccaggtatcattatttatgttccacctataaaagacatgtttcagtgacatttcagaaacacagtgatagtaatgatcaacatgatgatgagggccaggcattacactaggagctttatttaccgagtcaccacgatcaatcctaacaagacctttacaatatggtatatttattctgttttccaaatgataaaattgaggttcagagaagtcaggtaactctctcaatatcacacagcttataaatagtgagcctcagattcaaacatagaatgctaattacaatattcttattttttcagaaaggtcaagatggacacataaaatagaagagcatgtccctcttgtctcagcactcaagcaatccatttatcttcacttatgatcacattttgggtgtgacttgggacttacttatcatcaatataacacaacctactcttcctacagaccaaaacagttctgtgttcttttttttttttttttttttgagatggagtctggctctgtatcccaagctgcagtgcagtggcgcgatctcggctcactgcaacctccgcctcgcaggttcaaaaaagtctctgcctcaggctcccaagtagccgggattacagatgcccaccaccatgcctggctaatttttatgtttttagtagagacggggtttcaccatcttggccaggctggtcttgaactcctgacctcgtgatccacccgtgtcagcctcccaaaaagctgggattacaggcgtgaaccaccatgcctgaccctttgttctttacttacccaagaaatactccaaaatccatgtttctcccatgtattagatgacctatttgaaggtagacagaagagacgtgtaatagcagttaagattctaaatcaaagctggacaattaattttgattaattaatttatttttgagacagagtctcgttctgttggccagactggagtgcagtggtgcgatctcagctcactgcgacctctgcctcccaggttcaagcaattcttgtgcctcagccttccacgtagttgggattacagacatgtgcgaccgcacctggctactttttttttttttttgtatttttcttttagtagagaaggggttttaccatgttggccagtctggtgtcaaactcccaacctcagatgattcgcccgcctcggcctcgcaaagtgctggcattacaggtgtaagccactgtgcctggcctctaattttgattaatttttattcacaactgtttcttcaaacaataagaagtaagaaacatcctaatatcctaagccttcaccagatgggactgttgtcaccgtctatctgccagataaccccacaaaatctgagagcacgggtttccaggtaagatcagaatatgggaaaaggaatcaatggtcatgttttggttcactatcacatggttctaccaggacacagaaatcggagcctcaattactgtgattcatcaaatgtttcccttcaggcatcatcccctagagcaggacatctcaagggtaaggtacaggcagatttatacccagagtataggtcaaagatcagggtgagttagcgaagttgtcctgtgctttgtactctgggaaccagtcaggaaaaatatgggaaagtgaggctggtatccattgggttgcctggctgggaaaggatgggagaatgtgtgttctgggcctcaagaaaaggacagatgtcatgacatacacgaagataaggaagcacctcctgcgagcacttccatcaaagcatgtagatgggtagaagtaaactatgaggaagagaagaatgtttctagccctgcaacatttcttccaggttttttgcatgtctgaaatcaactttaataggcagtacagtagtctgaaaataaggaaaattttcagtacaatcacaaaattttaccaagaaataaaaagctgtatgcaacatacacagaatttacatagcaagcccaaatttcagaagttctaatttcatttagaagatttttctttatgtagtgcttcatgctgcccaccctccctcagcgcacaattaccttttttgtcttctgctactattgaagtacaaatggtaaataattcataaaaaatattgaatgaaataatctctcctatgagaaaagaaaattttgtgttaatatacagaaccatgacaatgggagaaaaatttgttttaagaaaaagtttcagtgttttcattgtgtgagtgtgtgctttggccagtggggctgtgctggaacggccggctggaggtggttttcttccccagcctggactctctagactcaagatgaaacaagtcaccaaggaggcagccttcgggcgagctgaacatctgggcaggttgcaattgttctccaacatcacatccaaaatgtttatcaacatgcttcattttgaattttcttttgggagcgtaaatatgatcatttaatacatctggctcttggctgtttgctggacatatattttgcccagatttttaaagtgtgactaaaatttctaaggtgaaaaaggagattcaagaactattaaaattagtacagagctgccaagaaactccattctagggtattttattttttgaatattttcccaaaatgtataatactgctatttagcatttaattcaaaagtaggcagcacattgtatttctgtcccatttaacattaacatgttaagctcaacatgtttttttcacccaaatccaatgtgtattttatttccattaaatttctaatttggtgaaattctagttattttattatacatttataataatttataataattatataaatttacaccacttatacatcatgttattcttcttaatccataaggtatttctatttggtattgagttgctagagttctttacataataaaggaattagacttgctttccataaaggcagcaagtacatatttccagtatgctatcttttaaatgagttttttaaagaagcagcacacaaaactagccacttttgttgataaatactactgattttcacaaattctcaatcatctcataaaatgaaggtactgttggctatttaaaataatgacactactgctttgctagcttaaagataaaacttttggggtcgtggggaaaatatttttcgttacatgccataaagcttaaattgaaattttaaaaatagcttcccaaaccatcaatatctaagaataattttaacgaatggcatgtgaggtcttctccctgaaaataaaagatactgctcagagaaatcagtaacttaaataaatattgagaaaaacaaagttggaagaattataccacctaatttgaagacttactataaagctttagtaactgaggtgaaatagtattgatataagggaagacaaaaagacaaatatgtaaatgaaacttaattccccaaacaaaacaacatatatacaatcacctgattgtatatacagatacacattgtgtgtgtgtgtgtgtgtgtgtgtgtgtatatatatatgtattgtatatttatatcaaagacaccactgcaatttgctgaggaaaggatagccttttgaattgatgctgtttaactaactggatataccacatgagaaaaacctgaagcttgacccataagtcatagcatatacaaaaataattcaaaatagatgataggcctaaatgtaaaaagtaaacattaaacatctagaagaaaatatataagcatatatatatgactttggggtaggccaagattccttaaatggatacaaaaggcactactcataaaagagaagactgagatattagacttcactaaaattaaaaatttctgttcatcaaaagacaaaagtaagagaataaaaatgaaggtcatagactgggagcagatattcagaatccatatatctgacaaagggcttatattcaaagtatgtaaaaaattccttcaatctaatttttaaaagggcaaaagaccttcacaagcccttctccaaaagaaacaaagaaaaccaaaaaaaaaaaaaaaaagtcaataaactgttcaatctcattaatcatcaaggaaatgcaaattgaaactaaaatgcgatactgcgacactcaacaaaaaggctcaaataaagattgacactaacaaaaaaaaaggaaaaaaaaagactgacactatcgagaggagaattatcaagaggagaaaactgaaactctcatactctgctgattgtcaactgctggaatcactttggaaaactgtttggcagaatctataaggctaaacacacaattactctataacacaacagttcacttcctaggtatatatccagaaaatgagtacccagacacccccaaaatgtactacaatatttataattcctttattgttaatatcacaaatctgaaaaccacccaaataccctgttgatacaatagcacaccacccataatgaaatacaagaaatcacacaggacagttcatattgttcagttctatttatacaaagttcacgaagaggcaaaactaatctatagtgacatcagaatagtgtttactggaggaggcagtattttctgcaaaggggcatgatggagcatcgtggagtgctgggctcttccgtatcttgatctgagtcatggctacatgcatgcatgcatttctgaagcttcactgagctgtatatctaagacctgtgcacctgtgctgtatatctaagacatacagcacctgtgctgtatgtatatcacacctcaatggaaacttgtaaaagaatttaattacttttttttttaaagcttctaagtgaactttacctaaaggtatatcagtaacagcggcaatacccttcatttcctcttcaaaagggccaggaaagttgccaagtaggccaggctggaaaacaaatatattaataaaagcatttaacataataacaataaaaaatatataatataatataaacaaatataataaaagcatgctttgaaatctagttcttggacatataattttttctagatactgctatcataataagtgataggaattattttttaaagcatttttacatcatgtagttataaaaagattctatgtaatactgaatattgggcccctatacagagaccagattctcagattgtttttcctgccttatttttccatcattctccagagaaggcaggaacgagagtaattccacttggatgacctaacctgacccacaccacaaaaacatcataacaagcactccttatctctctgcacgaattcaccctctagccactggcatataccgttcttaccatttccttcccacactcacagagataaacctgcactattctatccatagccctgtgtcatggttaatggctgatcttcagctaagatgaagtaactgcattcttttagcaaaccagagacattgagcaaattcagtggtggacatcatatatttattctcaatggcaactactaacatccagatcacaacttaagttcacggccttttgctgagataatctgcttaaaattcacgaatctcacttttttaaccaacttggtaattacatgtaatgtcacctaaacatattttttttctccctaggaactcaaagcattccccaagtggaatgttccagccatttaacaaacaaatgtgacgtaatgggtatttattaaacacttattacatccaagcactatgctttatacacagtatgtcatttaacccttacaaccaccatatgaaatatatattagtaattattattctccctgatgagaaaactgaggtttcataggttaagaaactttccctaggacacaaggctagtatgtgactgatccagccttaaaacccagtattgtccgattccaaggcgtggcacaaaaactctctgcaatgttgccctccctgataacattcagagtagaggggagattaaggcatacggggaacgtgggggcctcatcctcttttgctcctgccagcatttttttgttttgaggaagtccggtaagtatgaacataaaggatagcctgaaacaaaagctccgagagcatgcacgtgagggataatgggtttggtgcttggcaggtacaagtgtcatagggaggatgtggccacagcactcagccgctagggcaatgattctcgaccacgggagatttggtaacatctaaggacatttttggttgtcacaactgagggggtgttaccagcatccagtgggtaagggccagggacactgctaaacatcctgcaatgcacatgacagccccacaaaaaagagacacccaccccaggccgggcatcctgagctgctaaacatcctgcaatgcacatgacagccccacaaaaaagagacacccaccccaggccgggcatcctggaatgtagacaagcccacgacaaagaaatatccaacccaggccgggcatggcggttcacacctacgatcccaacactttgggagaacactttgggaggttgaggcgggaagatcgcctgagcccaggagttgggagaccagcctgggtgacacagcaagcctccgtctctactaaaaattcagaaaagtagctgggtgtggcggcacgtgactgtagtcccagctactcaggaggctgaggcagaaggatcccttgagcctgggagatcaaggcagctgtgagctatgatcatgccagtgcactccagcctgggctacagagtgagatgaggtctcaaaaaaaaaaaaaaaaaaaaagctgcccaaccccaaatgtcattaatgcccaaaatctgccatcaagagcaatgaggatccctttaacagttctaggggccaggccctaggtgtttcattggttctgcgtcaacaaaaacggggctgagaaatggagtcttcctgcatgatgaggatgaaaatgaaatggtttggtgattgcacagaaacactcagcccaaatgagtttcagggtcagagctactgaggaactctacagaataaggggccaggctgagtatgtcatttgctcatatctacaaaaaaaaaatctctggatgtccctgagacacttaagaaaaaaaaccaagtcttcaatagtgaactcactacataaagggaaggaaataccacactcccagatgaaatatggttatttgcccaatgtcgtaatgtagtcccatccccttttacgaaaccataatttgctatgctgtaaccctaatattaccaattccccaaatttaagtccctctgaagttctgacagtgagctagattcatgcagatttgcccaagtccctgcgaagaggttgctgaattatgcctttaaataaataacagcgcattttctatgtgcttaacatttattgtgagaaataatatctcttaccaatttttcatccaccacctgcataatttttccacttggcacgaatgtatttatcatattcttcagagaattcactataacctttagctgaaaaataaataaaatgcttactaaaagacataatgaaatgctgtcaagattaccttttggcttacccatatgtagctaaaagagagtgctatttgacaatttatatatatattttttaaaacagcatctcgctctgtcacccaggctggagtgcagtagcaccatctcggctcactgcaatctctgcctcccaggttcaagcgattctcctgcctcagcctcccaagtagctgagattacaagtgtgcatcaccattcccagctaatttttgtatttttttttttaagacggagttttgctcttgtcgcccaggccggagtgcaatggcacgatctctgctcaccgcaacctctgcctcccgggttcaagcgattctcttgcctcagcctcccaagtagctgggactacaggcatgcaccaccatgcctggctaatttttgtatttttagtagagacggggtttcaccatcttggccaggctggtctcgaactcctgacctcgtgatccacccgcctcggcctcccaaagtgctgggattacaggcatgagccaccgcgcctggcctaatttttgtatttttaatagagacagggtttcaccatgttggccaggctggtcttgaacttctgatctcaggtgatccgcctgcctcagcctcccaaagtactgggattgattacaggcatgagccaccgtgcctggcctcgattaatacattaatacagtaagtctaattttatctttaaagtgaatttgattcttaattatttacatgaagggagatgacataaagggaaagaaacaaaggtaaagtttacaaaaaagaacaaaggctacagaggaatgacctcttttcctctgctgtcacttaacgtatagggcagaaaggtatcaaaagcacaattttaaactattctgtgggtaatttcatgaagtgttcttttaaaaatacaataatatttaataaagttagaaataaaagatttaatatagaatctccacggtccttggggggaaaataaataaataaaataagaaatatggccgggcatggcggctcatgcctataatcccagcactttgggaggctgaggtgggaggatcactcgaggtcaggagtttgagatcagcttggacaacatggcaaaatcttgtctctactaaaaatacaaaaattagccggcatggtggcaggtgcctgtaattccagctactcgggaagctgaggcagggaaattgctagaacccaggaggcggaggttgcggcgagctgagatcgtgccactgcattccagcctgggtgacagagtgagactctgtctcaaaacaaaaaaaaaatcaatcaataaataaaaataaagaaataaaataaaaaataaaaataaagaaataaaagatttaagcatcatagcataccactggtgccttgtcaagcatcaattcatgccatcttttgtagggtggtaagtcaagatttatggtgtaccatggaactgcacctctgtacctgtaatgagaggtgtatcatcttgaaatgatgaaagggttttttgtgagggtcagttagatacatctataagaatatatgagaggcaaagtcttaacagcagtgtagaatttggttacccaaaccaaaatttggaaagaaagttcattctctacctagtgcttctaggttgagaacacaatcataagcggtcacagaaatcctggaatagaatgatctagtagggaaggttcatgtgaattggttttctatgaaaaaatcaactatggcttaagagctctaacctgattatcactgacgggaaatacctgccattttttttttctcctaaatatctgcaaagatttagtctgggctctagacaattctccaattggtttccagtttcagaattctctctcagagagtgtaacactattgccaaaccaatgtctccagtgttgccttcaggaagatcaccttttaagccccagatggcaacatgtattatcttcccacgatcagcttcaagaaccttcatgattctgtcagccatcctaatcttccctactatatacctcttctcttctcattttcctggacaaagtccaagcccaagctgtattctgtcatatcctccaacttcctactctttaacttacgtgcagcaatttctgaggatatagcaacatccagtcacttatcagtgaagctgggccatatttctggtggatgaattctacaactatttttgttgctataggaacattattttctggccctggttactaaactgaaatagcttttaagggtgtgccagttagtggtttatcagtataaacctatgcctaaaaataaccatcatctgttccactgatctgctcctgagactggcagggtgactctggtatgtgccacaatgataccagtctcctaaatagaaatgttatctagacttatgtccatagctggggatgggttattacctaagtcatgaactgtggttctatttatatttccactatcataaataattacttggttctctaaataatgctgtgtaacttggggccctggtatatgtatgaggttttatgaaactgttaactagcagacattcaggttgtgatttagacagaaaagtatattcgattttggaaatgtacatttaaacaaaatcatagtgaacgaattttgttcttctcaaagcattttcaagttccccattttcttaggagctgatatctacatgaaatgctacaatacttatattctagaaaaaaacttttcatcacaacaaattaattccatttctgacagaccataatttcacatgtaaaattttgtcccacaattcagtaagtaattattgttccccatattatgggcaggtattactagtctcccctctcccttcaactgtgcatttagatttctatgtctagtagcaaagataactcagtggcctgttggagatatgcatctcatccctatgaactccaatcagctgctcctcacctcataacatccaaccaatcccaaatcatgcctctatacccgccataaattcctgattctttttcagcctagagtcctgggtaggttcatggatctcagagacgcgatgagaggggatgaacacaacacaacggacaatgaagggattacaatgaagtggggatgatgagaccccacaaacctctctaccatcaaacctgcactaattagaatttgagagaactggttaatctaataaaccaaattattttaatgactaaagcttagccataattgcacattttacctctcgttaaacagttttctaaaacatttcagtatttaacttgtgcgcctccatttccccataagaataaaagagtatccaccttataacagcagggaagacactatatgaaaaatgcaaaaataaaaaaaacacttagcagcattggtattcaatcaacagtagtcatcacaatttattttcctacttcactgcaaacaagaaatatcatttcatcatttttgagacttagtgtttgcaatgtccatgccattcataatatcagcaacatcacctgaacccacatggctacctaggtggcatggaaactagtccaagtgacacaacacacacatatacaaataagagagcaagtgctaggcatcccgtgagcagtgggaaagaaatgctgaatgggactcagatggactcaggggtgatctggctatcagttcctttatcttcagcattgatttgactagtcatgctggccaaacaggttatctttttcttccctcatatctgcccatggatgctgcccaaatctacgcacttaattgaaaaggatgatctcaaaggaacagaacgtctgtttgtcattcaaaggtacataaataccacagttatctcctaaatctcaagatccattgatagagttgagagaagagaaggataagagcaaagccgaggctttttgtgtaggaaagcaggctagtgagataaaaagaaagctagcgaaaaaatgaaggcaaggaaagaaacatacaagttatgtccatgtatacacgtgtatgtgttttggagtacatatgtatgtatacatgtaggtatgtatgcacataggtagacacacactcacatgcacatggcaataagagtcagtaaaatgcctaatcaggaaaggtttatggtttgcagggcattcaatttatagacacatgtaaagtgcacctaaaagggagtagaaacggcctcaaacatggaaggcacctcattaaatgttcaatgaattggggcagtgagaccaacagagagacataatcaatcagtaaggcagacatgtcactgaaggccagaatgatgccagtgatgacagaaaggaagactttcagacagcaggccattgaagaaagagctggaatgaacactggccccaaacaacatccaaactggttacctctaaattgcttcctgccaaatactggcctctttctacataaaggcgagtaagtcaaaagaacttagtttattacagtttcacgctatctgggacagaggctatttaaaatacatcgtttagacaacaacagtacaacgtaagtaatttggaatgttgcacgaactgaaaatgtcatcttgatatcactagatagagttgtactgtttccccctacaaacagcaggctactttcagcgaaagggcagtgtaggagaaaaagatcaccaccccctatacctgttccttcttttctctgttctgtacactctgaggggtctgtgagctgttattatggctttctcacaggcccatttaaacactgaggatttggaaagaccaaaatctagactaaaaatattaatgttaaacacactgaatcatgacattggtcctcctcttaggtgttccaatcctgttttgtcctcgacagctttgttgtgccaaggtttattttgagaacgtttcacatatgagggcctatgcttttttgttacaatataatttggtggtttatatccaggcaccatagagaatcacaggtcatttcaaatacagcccttacatttgtcaaagatgagaaaaacccttcatggtagacaggagaattgagtggagaatgaaaatcctttcctttttttttttgagacagagtctcactctgtcgcccagactggagtgcagtggtgcgatctcggctcactgcaagctccgcctcccgggttcacgccattctcctgcctcagcctccagagtagctgggactacaggcgcccgccaccacgcctggctaattttttgtatttttagtagagacggggtttcactgttagccagcatggtctcgatctcctgaccttatgatttacccgcctcggcctcccaaagtgctgggattacaggcgtgagccaccgcgtctggctgaaaatccttttctttccgatgattttgatagtctagcgacgggcatttgaatcggaagatattttcatatttgtccaagatctcagccaaatgcataataaacaaatctgagaaacaaacctctgtctcggaatgggaaacatgacttaagattttattcactatcgttcgtttatgagcaattattacatacagaaaaaacttcacaaaggtcaaagggagttttgatcatctgatgtttactcacgttggtcctgaaggaggataggttgattttctgcagtcctctgtccactgaaaagcaaagaaaattaagtttcagaaaataacaaatgcttgccaacggaataagcaatttcaaaagtagttaatctgtgaagacaacatcaagtctgatattgctcttttatacgtttcaatgcctcttaaaataagtcttttctttccaagaaaacttctaaaatcctaaaccattaagtggattttcagtttcaattcaatttgtaaaagtgctaggtgttataatttggctctaatatttcaaatatattgagtaacgaacaaatgtaacaaagtagatggaaaatatttatgttagagaggctgacttagcactaaaagtaaatgacctgataggatgtattatctgcacttaccagccatgtgtgttgcaacctgtcctgggatttgcctcccaaaccagattttcagggcacacagcacagggcccttcatcatctttccatggtaacttaccatcccagcctcatctcctgacactccccttagtatttatagccatacgcaggcacttcctatcatctctcacccttccatgcctgtgtctgtgctattccctcttgctagaatgccttttccccacctggtgaactgctggttctaacttccaagattcagttcaagcattttctttcttgtgaagtcttcatctatcttccatatgaaaatattcataccctcctttcctcccacagcatttgtgcacactctcatcaacatgtttatgacactgctttataatcatctgtttgcgttccttgtcaataccagactctgcgctccttgaggtgaggacggcccccaacactgacgtcactgcctgagacaaggaatgaacagactcttttaggggaagttgtccaagcttagtggcaaaatggaaccttctcctaaacttatcaaaaaaagtccacacagatttatgattcttttgttactcattcaacatatcaagtgtctttatctcctttcctctggagaaccagttctgtgaaagtaaaataattgttttaaaaaagtacaaatccaaaataagataaagtagagtaggtaagaaaactcttggaactgtagcttgagctcagaaaactcttggaactgtagcttgagctcagaaaactcctggaactgtagcttgagctcagaaaactcctggaactgtagcttgagcacagaaaatgtatctgctggacagctgtgtaagaatggaggtctagcaccttgttttaacttttgataacatggggaatatataaagtaggttgacattacctgtgattcaaacattagctgtcaaatttgccttaccacactgtaagtttctcacatatgtctggctttgtctggtaattttgcgttgaattcattaagaaacaatatcaagtctgtagcaaaagctaatttccaaagccattcgtgttcagtaatagtggctgggggcagctcgtttagaaaaacttcagtctcaactgtgaactcaaagactgcaaaactttacagctagcaagctatctaatggctctgtcacaagagacatcaggatatccggcctctatttctgataattcacagaaatgatgacggttatatccacaagagcaaatgaagctcatggtttatattgccggttcaataacacatgtgagattccaatattttccacaaaatatctgaaaaggaatactataataaataaccatgagctttaaacacctcgcatgttcacaagttttgtgaatttgctcaactccgcctttttctactcacaaatatttttactactgtcaatttttatagatcttagcagattccattccaggttatactcaatcattattttctcagcttcttcgaaaacatcctcgcctgtagttgttttatacagatgattcagaggctaactcttcagtcacttcaaacttggcaatgatcatctaataaatatcaacaactgatcagttatcggtatgttgacagtcaagaaaaatcactcaaaaatcacatgctttgttctttaattgatattgatgttcttcccaaagtccaggacaagggttctcaatgacatgtaaaataatttcattttccctggacacaatacttctgctactacaatcgaatacaatttaggtaatccaccattggtaaatggctttccttattttgctaataaatgagctacttagagacttataggggttgcaacttaattttactttgtaaaatttgtaaataagttctgctgtgaggagatactccgctttacattttcttgtttatctgaccattgttttcctatgagttgggaatactgtgatgggtacttaacccaagtgcttaattttatgatcatgttgtggacttaagaccctgctccattagtgacttgtagaaagttacacagctggtgacagaatcagagtcaatggctttccctgttctatcaaacagcttcccacagagataataaaaccaatgcctcaatttaattcctaacagaataatctgcgcgtagttcagggcttctggtgatcactagaatcaactcggcaaattaagtgaaacgtaatgactcctatcccttcctaataatgacatttgcacgccctgggttccaaagccaaaataaacatcaaattacaggcacatttcttactagacaactgtgagcaaagttgaaaatgctctgtctagtattaggagagaatgtgacctgccccagaggtaagaactaaagagcaagctagcaacaatacatgtggagtgagtctgaggttgataacgactcttggtagcaataaacaaacgtgaaattggcatagaacctggctgcaaggaaataggataagtgtgacagaaaataagaaagttggcagctatgagactacagtatttcaggggctcacatggcatgaacgcctaagtcgtttatgcaaaaaggttagttttaggggtagggtggaaaaaagagctacttcctccccctcaaaaaagaattctacagggagacacagcttcaaaacccacgagtagccctaaaacagaattataatgaacttacttaatgttatttaaagttccttactatccccaagtttataaacagtttaataacagacaactctattaaggcaggtaaaaacttaaatagatgataggtaaagattagaaacagatgataagaagagagattatgtggtctggatggtatactatgtacaccctatcacaggaaacaaaatccaacttagaatcaattctctctaaccctctccccacagtacctctctttctctctctctccctgcccttccctacctttctccctgcccctcagtggtctcctaagagtgaagataagtggtaaaaatctgatatttcaatgcatttgaaactctctgggccaggcatggtggctcatgcctgtaattccagcaccttgggaggctgaggtgggtggatcacctgaggtcaggacttcaagaccagcctggccaacatggcgaaatccccgttactactaacaatgcaaaaattagctgggtggcatgtgcctgtaatcctaggtactcggaaggctgaggtaggagaattgcctgaagccgggaggtggaagttgcagtgagacgagatagtgtgactgcactccagcctgggagacagagcaagactccatctcagaaaaaaaaaaaaaacaaaaaactctctggaaagtgcttttaaaagactgtttgggtcagaaaattctctaatttttctggttatttgatagaaacttaagcctctttgaatgtcctccccattcattaagagaaattaattacagagctactgaacacaacattctaaaaaaaacacaaaaatataaagagaacattaaggtctcaatgaaagcgccatacccttaaaaaatggcataacttgtacagctccttaaaatatttgagcccgaaagaattaggagaccctcaatgaaataatgtatgcttctaatagtgaattttaaaagtccagaaagcccttgtgtgcttgtcttattgaaatactcagaaagagacaatgaaggataatctaaaattacatacctcatgtcagttttcatacccaccagaagccaaacaactctagccagacaatttttcattcattcaattcttgaattcatcaacaactattttgcagacaagtttttcctataatgtcctcttatgtacaactcagcagaaacactgaatacaaagaggcatgtttcctacgtgtacaagaattcacatgagcttgaaaatgttttcacttgtcttctgggctttgatgggatggcatcctattaagctactgatatttaggtcaaaggaatgtgaataaaccctccatgagaggaaggacctcatctatctcattggctgacgcattcccagcgtttaggagtctggcacatagtaggcaagcagtatttgttgaataagtgaatggattacacctgtgtgttccctctttgggagaagtagggaaaagcagatgaagtgcaataaattcctaggccagatggggtctatgagatttctggcaactgcgtgaaaatcattgctaaagctgattcaatagctaatgtcaacaatgttgacatacgctgttaactagtatgagaagctgatgcataaaaatgagtttacaagtttactttggcaattaattactaagccattacgtttcatcttcgcacatcttatgaagtgggtcagatttattacgcagagcagccatctctcccctctagttcctttcctgccaatcacacttagcctaccgcaagctgttttctgcccccaacactgctccagtcgaggtgaccaatgacctccagttgcccaacatcataataccactgacatctcaataatattcaacatagttaacctgtcccagtctcttccctgagcttcctgttccacttactctcctatttttttgtttttgttttctgtgacgaagtttcgctcattgtccaggctggagtgcaatggcaggatcttggctcactgcaacctctccctcccaggttcaagcaattctcccgcctcagcctcctgagtagctgggactacaggcgtgagccactatgcccagctaatttttgtatttttagtagagacagggtttctccatgttggccaggctagtctcaaactcctgacctcacgtgatctgcccaccttggcctcccaaagtgctgggattacaggcatgagccaccgcgcccggcctgtcctgttttaactttggcaatttctcctcttcttgacacatacatgtgcaagttacttagcctttgcctagttctcttttcttctctttctctatcctatttctaggtaagttcatctgctccaagggcttcaaatataatatcattatgccagtgactctcagtgtctctcttctgagtgccagtccgagtggcctgctggatgcctctctgccacctgaaatttaacatacaccccaaatgaaaacgatcctcattctttagcccccaagctttcccctccccatgtttcctggaacggatgccaccattcgcccagcgaagcacttcagcaatgtgcaggtcacgctgacacctcactccctcatcctcacccaacgattccttcagctcattcgccctcctgatttttttctagaacatctacttctctccctcacccctggcgccaccatccttcaacgcaccctgttttcttttctggactagtctcctcatatctacccttgctgacctccaatccagactcatctttttaaagtgaaaatgttatcttgtctaaaaccatctaatggcctcccattggctggttccagatcctcccattttttaggataaatttctgaatccttaataagagtctacagaaccctggatgatgtcatctggcgctatctctccagacatttcttgtgccactgtcttcaccatcatctcttaatagactcctaaaaaattcaataatgaagaataactcaggaggaccttcacataggaatattgtgaaaagcctcaaaaacaaacacacaaaaaatccttacagatgttctaaatcaaatgacttgtttccaatttaaagctgcttctcattattcatatttattgaaagtacttttgaaatatcttttgttaccatgaggctatagtttatcatataatgactccagttgaaaaactgcttattcttctcagagaatgaagtcactaaacttctgtaaggttctaaaggtccttcagtgcatggatcccaggattttccaggccagtaaaaaaaaattaatgaggccttggcacaggagggtccaaatttttattctgccaaatggagatgttaaaacaaaacaaattccatgcacataacatctacctctgccgttatttttaagaacacgtttgcaacaatgaaaacttgaagtccatacaatcagagtaaagattaacattctaaattaataattttagttttgcattcttatttttccagtttcattgaaaacctgtgaaaacagcttcccaaagtgacaccagtggccagactagactttgataatcgctgttctagataagaactattatatccattgagaggttgttaattcttcttctgaaaatagctatcaaaatacttttgctagaataaataaagctattgagaaagaagaaaaaacagcctccaacacctgaaactgctctgagtcccacagctatctctcaatattattacaagccgatctgacactcacagccaggtaagctctgttttcctcctggacatcaacaatcccacagatacctacgtcggataagattattctgagacatgacacaccaagacaaagcaatgccacttgaagattttctctaagaacagacaaaaacaagggcacctgcaacgcacaaaacaccaaacatccccttctcgtgctaaacagaatggctgttccttctttactcagtcagaattgccccaccttctaacagcattctatctacagcaaagcccggttcctcagtcttaccccaaatcatgcaaccgaagttcaaattctgtaatgggtttttttctataacctaccgtccgtcgctcatggtgtgtggtctcctttgcctcaaagaacactaaacccaatttgttcagcttatggtgtgttcctggtggtctttcaatgaagggccctgacagtatcaaagtatcaaagtctctcccaattcccataaaaccaactaccgtcaagcaaattaattccctacccacaatggagcaattttattttaaggcctttaatcgtgtccacatacatgttctgtgtattttcctattacaggaaaaactgtatatactattctggattctacttttatctgctgaacattatatcaattttaatggctaaatcatatcccaccatgattttaaagaatttctccttacaggtataaaagaagacaatgcacatcttgcttccactttcaataacctacctaaactattcaagaccatcaccatctagcctcaggccagatgcgccaggttcctacttatccgattctgttggcaaagacaaacgcagtctgattgctttataaagaaatgaattatgaaagagtactgggcgtcaagaggctcggacgttacgcatgttcagtaaacaacagtgtaacctctggctaaatattttctcactctaggtctacttcctcttctgtaaaatgaaagagtcacgctcgtccctcactgtctcttgcagttaggaagtccgtagccctgtgacttgctcgtgggaaagagccacgggacaggcgatcccatgacttgggtgcaaaaggccacagggggccctttggggcctgctctgggctgctcgcaccgcccaagcttgggaccactcagcgtttcccacggccctgcagtatcctgggctgaactcctgaacttcttcgggagaaagcacctgaccatcaggcagtctgtccttgattgagtaatgcacacaggtccaccggaacattttatttaaacacttcaaaatgcaagggcctggaactggttattcaagtacactcactcaaatctaagaatgtgcgaatcacacccaggtatcctgcagagactaggatttcctttaaaggagttctagttgcaggtagcaccgaatctaccgaggacggggttcgccagcccgctctgcacccacacccctgtgcacgaaaccacagacccccgtaaagaagctgcccagcacgaggtgttccttgtacccgctcgcgccgccacacctgcgcctccatccgcgcccgcacctgcacgcccctctctgcgcctcggctcaagctcactcaccggcggcgcgtgctgcgcgacggcacagctgacggcggcagccaggaggactaaggcgacgcaactccggcccggcatcgctctagcagccaacgccactccccggactccagcagaggcaaagaagagccggctgggccgggggcaggccacgccccctccgccgcgtgacccgcgacctgggaccgcaccattccaggcagtagggggaacgctcggaggaggcgggactgggaggagaggacggggcttttcagtgccacgaaaagggtggcgtagagaaagagagagagccttccaggctacctgcagaaggagagtcgcgatcgcctttggcgcgtggcgtgatccatccccctcccccaccgcgggcaatagtcggaccgagccggagccccgccccgtaggtggggccgggagcttcacccgtggcgcctcgatggggcgcctctagcaggcgggtgcagcctgtcccgcgtacccaggcgtcctcggtacccacgaaacggatccaaagagtctcaacactaatgtaacatcccaccctgacccatctttgccctctgagaaaagcggcccgaaatgagttgagttattcatccccaccgcggagtcagggacaaggagcagttgagtggccgaggagtgagagagaatcgaatccactcgggtcctccaagctgttggttacccacttgggctttcacagcaaagctgccaaatcccagaattgaggcctcggtgaaaagcgcgctgagacttgggtaggaggcccggtgggacccgcgagctttctctcccagcccgatgcagcagttcattaagcggctgtgtttcctcctaactggcgaaggactcaggtgggcggagcagagctcagcttgggaggaggcggacgcgagtagctcggcagggggactcgcttggctttcgtgccatccgtggacacagtcgcgcgggtaggtgaccgggttggatttcaaagtccagcaggaaatcctgccctctgggttgcacttcctggatgagcctctgacgtctcaagcagcattgttttaatgctttgatgaagctcagcacgctgccgaaatctcggcagtattttttcttttctttttgcatgtgagagaaaggacaacaaattgcagttttatccatttgtattatttctttagaaaactcaacactctttttgttggaggtggggaaatgagaaggtgatgttttgttttgctttttttcctattttttttttttaaaggaggagaagatgacagtgttctccctaaggatgaagtttgacttttgaaacatatcacatgcttaaagcacatttgagctcctgcatgaacagtaagctagcagatggtagaaatattctttattaattcaaaaaatatttactgcggacctacaatgtgccaagcatgtctcctgacactggggataagcagtgaacaacaacaaaaagacaaacttcttccaccctgaggcgtatgttctcggtgagaaatgggcaataaacataatacctaagaaaattatacgggatgttagtgacaaatgcagtggaggaaaagggaggccaggggcatcaagtgtggagatcagaagtggtagagttacaattttaaataagagggacagatagacatgattaaggaggtgaagtttgagcagacagttgagggagaccaggaagctagttttgtgtgtgcccaagtaagagtattctaggcagagacagcagctgttaaaaggctttaaatggagaatgtgcctggcatgttcaattacagcagacgtgtgtgggtctggcacagaaagaacaaggggaaaagaagaaagaagtattaatagacaaagtatttagttaaggagagcagggcaaattctgtaaggcattcagagccatttcactccggaaaaaaaatgtgtaatattgaatatacgtgttaaatgttgaatctatggaattaccttggagcttaaaatgagtgtgcgaagaagaggattcccatcttttagttgttattactaaatcaaatagctacttgattggaagatcattcatcttcagtactcttgagagcgatttaaacatgtcaccaagcatatttttttccctactggaggatgttaattggtgattaggtagtctagcaaaatcagattctttatggaaaaaatttgtcaattgacatactattcttaggcaccactttcgcagaactatgcgtctaactttcaaaggtctattatatattattaatactcttttcagataaaatataaatctagttccctaaaattaaaccatttcatgcatgtcttttttttcttacacatatatctttattttgcctacaccattctttaatactagaaatgtacagaaagtcaaggcaaggtgtgtgtaggagactttgcagtggtttttggcatactgatctgttcatagaaaatggtatttaaatgtgcaaatgcatgattatgtccacggaaagggtggttcatactgcacaaaagcatcaagtttaagacttggataacctgtttcgtgtgcaagagtcgggatatgtaatcagattgtttatggaatagctgaagttcttggcaagctgtggacttcctcatctcctacctaacattcctaggttcctgaggtggagccttgatttaaaagggttgcaacttagccaccccaccctaaatgaaacctatcatgtataacatcacattacctggaacaggtttgacttgatttagtaaaaccgaatatacaaaaacgtgtactaaaaggtcaagagatagagaaataatgtttcagtttgagaaataaacatttttttaactttaaatattgacttttttatgaataaggaagctttttattttacaggtctttgtgggaagaaacaaatcacaaaagcaattaagagagctcaaacaatgggtaagaaagagcacctcaacaactgtattgagctagctgaaattttgctcattatgctttgtcaagaactttaattatctctttacagggtttatgccagttacatacaaggatcctgcatatttcagggaccctaaagtttataacatcagatatccggaataaattccatcacattaccaccagtaaacttattttatagtaagtggttgtatgacgccaatactgactcaaaccaacctttggatagaaaagtgtttcaggagtgaggtaaagaatgacacttccccttcataccaatcagtgttcattaagcagatcgcttatttaaaatgttaacactcatcacattttacatatgttgaatgaaagtggttctgggtgatagtcatttatatctggtccacaaatagctcatacaatgtagtacaccattcaactgaatggagttaaaactgctcagaatggttttctaactagcaaatgtaagtatgcctggttaagagatcttccctttgtaggaatgttacactgggatgcatagtgatgctgtcacagcaggacaaaacattcctagacaactctatcctcaaaccagtagtgtcttttacataaaaagatgatttacacctaatagacagtgaatgtgatagacatgtatgtatatatgtatcagttctgagttccaccagcctatcccaaacacactggattaccaggcttgtactgtactcaaaattaaggatttgctaaatttcgtgcaaaggactctaaactaggggagagattattgtttgtgttgcgttatagttgtgtaataattaaggctgccagatttagcaagtacaaatgtaggacaaatttaaattttagatcatgttttgcaaaggtactgcgtgagatccagcattttatctggcaacactagctgtaatgtacttctaaaaaattatcacctaaggataattttaatgactcagataaatttcatataaatttctttccacattgtgaaaataaggctattctagcttttctaatactttttttttttttttaatagagatgggtctcactgtgttgcccaggctggtctctaactcctggcctcaatcattcctgccttgtcttccctaagtgctgggattacagctgtgagccactgtgcctggcctcacttttccaattctaaagaatgtgtgtaagcctttccctcaacaacttattgaaaggcgaaaaaaggtttggaaataaaaggatctgatgtttgaaaaagtactttgtaaaataaatgcactaagacttatctgtggattactgcaaagaggtgaatatagtaaaaacaaatgaacttacctgtattactgcaagtagctcaacctagtaaaaacaatggaaatgtttgactttacccatcagccaaattaaaaaaatctccttttaaggttaaaaggatcaaaatgtaggtgaccgtgaatattcaccaaaaccttcatcttttcaatctcttcatctgtttctgggctgctcattttggatgcttttttattggttactactatcagtatctgttttagatggtttgtcttgtgtgtctaacagccgtgaacactcttttttttttttttttttctcctgagtcgaagtattcctctgtagcccaggctggagtgcagtggcaggatctcagctcactgcaagctccgccttctgggttcacaccattctcctgcctcagcctcccaagcagctgggactacaggcacctgccaccacgccgggctaattttttgtattttaatagagacagggtttcaccatgttagccaggatggtctctgtctcctgacctcctgatccgcccaccttggcctcccaaagtgctgggattatagtcgtgagccaccgcgcccagccaatttttttgtattagagatggggtttcactgtgttagccaggatggtctcgatctcctgacctcgtgatccgtccgccgtcatctcttgaactgccatctgtcagctaagtctaaggttttatgcttaaccatttgtggtgtactagctggactagcttcaggaatgtcagtgttttctaccattaaggtcagattgtctactacatcgagatggtggtggttgttagagctacctttagaaacatgtctgtttttttaaagacataacacatgcatgaagaattcagaatctggaaaaaaggtccataatgtttgacaaagaaaaatgttctcctgagggtcttttttggatgctcttctctcgttctgctggaatctgggctcatctccttttttcaatttctcgttttaatctgtttacatcctttactagtttatctactgcttgttcactgtcttccacttttttgcatatactctttaatttctcttacaatgaagcatacatttcatttatcttatgtacctcctttaaggatccatcttcttcaaaaaatttagagctgtgtgtttgtactgctcggctaaaaccagtggacatacaggaacctgatacagttttataacctagttgttcagacatgcccagattggcaaccactgaaggtaccctgtgaaaaagtccttttcgaggtttatataaggcatgttccagtcgatgagtagagcggctttctgttattatacttggtgttcatagcagaaaaaccaggtcttggtttgaaaaatgctcctgcaagtttttgtgaagcagcctctctctaaatgtcatgatctgatctgaatgacgatggaatttgtaacaacctaccacattttttgtgaatttgataatattttcctcagtgcctgcttatttacttcacctgaagaattataaaaactaaaaaactgatagcatggaatatatttctgaatgtcaattgtataaacaacttcagcatcatctatttgggaatcagtaatgctattcttttttttttttttttgagatggagtctagctctgtcacccaagttggagtgaggtggcccgatcttggctcactgcaacctctgcctcccggattcaagcaattttcctgcctcagcctcccaagtagctgggattacaggcgcccaccaccatgcccagctaattttttgtatttttagtagagacgaggtttcaccatgtcagccaggctggtctcgaactcctgacctcaggtgatccacccgcctcagcctcccaaagtgctggggttacaggcgtgagccaccatgcttggccttgtcttctcccttctaatatgaaagaggaagctaggaatccccattgctgctggcatgcatgctataaacctgaagggagccacctaagatgaaattgatactgtggactacacagtagaaagatggaaagaaactgggtcattgatgacattgtcaagatgctagatcaaccaaccacagatcctgtccaacaactggactcttgatttacatcagccactactctgttattgaatcttggacaagttggtttgcttacaagttaaattattgtatctgagagcatcctaactgatacacacatgaaaatagacatttctcctttgttgagaaggatgtacaacaaatctatgaactttaagttttagtaccttcacttgctcatgccccttcccaaccttttactaaattttatgcttgtaattttgtattcttttccttaaggaggaccacttaaattgcataagattcaggtgtcaccaaacctggatctagcatcagatgttgttggaagaaaatgtccacctttctctgccgtctcctccattcatgtctccctagggaaggagagatgtatgatgtatctaatcagtaaatagttgaaaaggtcacagaacgtgcgtggcctggcctctcttctggcgctttcattcagatctgcctccccacagtagtagatatgcctgcccacactggtaattctactgcagcaagccttgaatgacaacagtggacgtgaaagtagttgctgcctttgaccacatcttcccaaagtggcacgtcaccaacagactttaaaatcatgacgttataacgtaatggctgtgaagatttggaagaaagcactctaaaatgagagctctgagagatgtagagagaaggcagtcaaggaatagcgcctataagcacctcctgcacatccggtccctgcgcctccatcctcaccctgccctcagctcactcccctcctgttagaaattggctgtgcccctgaaaagtcatttgcatttgcctaaagactgagtacacaagctcattccaaagtagaaggtgttgaagttccattttggcctcaggtcaaaattgttttctctatttcagcttaatgagcaagaaagcagaatctaatatgtgtatatttctaacgcctgtgtatatttctcaactgtttcccagctcagaaaggtgaggagtatgacagtcaccctgaaatgacaacagaagccaacaataacaattatagtaataatgtgtgtatagaaagtactaaatgaccattaaatgaagagcagattactaggtgctatggaagatacacatgcagtgaaatacaaattccagatctcagggagtttgcaaccgaaaaagaatataacactaatatatatacaaggggacttcaaaacgttcacctgcaccctccacctcccaggttcaaagatggagttaaaggataaaaagtataaactttatttctttttttttttttttttgtgagatggagtctccctctgtcgcccaggctggagtgcagtggtgcaatctcggctcactgcaagctccccctcccaggttcacgccattctcctgcctcagcctcctgtcataagcaccatcaaggtcaagacacttttgtcagggatgataccagccatttagtccatccttaaaaaaaagagggtcctgggaatttaaccatgtcaatgcagtctttattaactgaagaaaaatgggtgccctttacagattttttaagattaggaaacaaaaagaagtcagaaagatttcctgtggaagctcttgcaaaattgcccttgtttgatgagaggaatgggcaggagcattgtcatggtgaagaaggactctctggtgaatctcctgggcatttttctgataaggctttggctttctcaaaatactctaataataaggagatgttgtcattttttggccctccagaaaatcaacaagcgaaatgccttgagcatcaaaaagaaatgttgccatgatctttgctcttgactgctttgtttgtttgtttttggagacagagtcttgttctctcacccagactggagcgcagtggtgcaatctcggctcactgcacctgcaccctccacctcccaggttcaaacaattctcctgcctcagcctcccgagtagctgagattacagacatgcaccaccactcctgactaattttgtatatttatatttatatttttattttattgttatttcttggagacagagtctcgctctgtcacccaggttggagtgcagtggtgccatctcggctcactgcaacgtctgcctcccaggctcaagtgattctcatgcctcagcctccggagcagctgggattacaggtgcatgccgctacgcccggctaatttttgtatttttagtagagacaggctctcaccgtgttgaccaggagggtctcaaactcctgacctcaaacgatccacctgcctcggcctcccaaagtgctgagattacaggtatgagccatggcgcctggctttatttttgtatttttagtagagatgaggcttcaccatgttggccagactggtctcaaactcctggcctgaagtgacccacctgcactggcctcccaaagtgctgggattacaggtgtaagccaccgcgcctggcctggtctgcttttgctttgactggaccatttgcaattcttggaagccattgctttaatcgtgccttgtgttcaggatcctactggtaaagccatcctgttacagttcttcaaataaatgcttcagcatcctgatctcacttgtttaaaatgttcatttaaaaggtctactcttgactgcagctgatctggatgtaatggttttggcattcattgaggggaaggtttgctcaactataatttttcacttgtaattgtgtaagctgaacaagttgagatgtctatgctgttggctgttatttgtgctgttgttagtcctcttcaattagggcatgaagatgatgaatttttttctcacaacttgatgtaatgatctggcactgtgggtttcatcttcaatgttgtctcatcctttttaaattgacttgtttgtttgtaaactgctgatttctttggggcattgtccccataaactttttgtaaagcattagtgatttcactgttcttctacccaagctttaccataaacttgatattcttgcttcaattttacagaatttgtgttgcttatataggggcttttttctgactgacgatttatccttcctattacctccagctagatcctttgagacatactacagtaacatagtatgagtttattttggtgcaaacaaattttgaaatcatacgtagttattttatagcatgcattttccatggactttttgaagtccccttatatatatagacttataaaggcagctttaactgaagcatattttacacatgttctatttggttgaagatatgaaattaccatttttgtagataaaatgtatttgaatattaacactttcatatagccaacctaattgttaccaacacccgaaacattcacaattacttgacttggaaacttcaacattccagaacattcacaattacttaacttggaaacttcaaattccagaacattcacagttacttgacttggaaactccaacattccagaacattcagaattacttggcttggaaacttcaacattccagagcattcacaattacttgacttagaaatttcaacattccagaacattcacagttacttgacttgccatcacactgtagttatctgtagacctctggggtcccctgcttctcctcactctttgaaggttttgacacctgactcactgtcactcttttaaacctgactcttggcaacattcttggtgatttcaacatccacaaagacaatctttccaatattctggtttcctgacttctgaaaatgttcttggatgccattttacctcaaatacccagttccatggtcatatcttagacattggaatatttacatcattttgcttctggggtaccattctcttgattcttccattactcactggccacattttgaatagcatctgttggtttctcctcatcaactgatctctatatgtaggagtaccctagggcctggtcatcagacgttgtttcttatttatctatgcttaccacttaatgtgacctcattcactctcatgactttagttccatctgaatattgatgacagctatggtttaaatgtgtccctccaaaattcaggtgttgtcagtgtgctggtagtaagaggtgccttctttaaaaggtgataacctcatgagggttcctccctagtgaatggaattaaggcctttatcaaaaaggcctcgcggccgggcacggtggctcacgcctgtaatcccagcactttgggaggccgaggcaggcagatcgcaaggtcaggagttggagaccagcctgcccaatatggtgaaaccctgtctctaaaattacaaacattttgtctctaaaaatacaaaaattagctgggcatggtggcacacacctgtagtcccagctactcgggaggctggggctggagaatcgcttgaacctgggaggcgggagttgtagtgagccaagatcatgccactgcactccagcctgctaacagagcaagattccatctcaaaaaaaaaaaaaaaagaacaaggcttcgcagccatgattctcagcaaactaacacaggaagagaaaaccaaacactgtatgttctcactcataagtgggagctgaacaatgagaaaacatggaca

SEQ ID NO: 343 - DNA, 40314 bp, Homo sapiens
caaaattgcaccactgcactccagcctcggtgacagtgaggagaaaaaaaaaatttccatcttaaaggtgtcagactcagactctcagttaatcttttctagatctggacaagggagggctcagagaaagcctggctgcatccatgcagtgtttttttgtttgtttgtttttggtttttttttttttgagatggagtctctctctgtcacccaggctggaatgcagtggtgcgatctcagctcactgcaagctctgcctcccaggttcgcgccattctcctgcctcagcctctcgagcagctgggactacaggcacccgccgccacgcccagctaattttttgcatttttagtagagacggtgtcaccatgttggccaggatgttcttcaactcctgatctcaagtgatccgccctcctcagcctcctaaagtgctgggattaccatgcctggctctcttcagttttctctgcagatgacaatctcccccacacaagacagtttttcagctattcttgtatttccagcccttctgaatagccatcttgaaatatatcaaagaagtatattttggggtgaaatattttagtttccctcaatacagagagcagggaggaagaccaaggccaggatggtcaagcgcttcaggttcagtgacaggaggtaggcttatcaagggacacaaaaaatcacccaacgaaagagaaaaacctacaaagtgcatgccattgaagctgatggaaaagtttcaacaagggggatgtggttagcaatgtccattgctattgggagagttgaagtttatggaagttactggcaagctgagggagagccggaggaagccagatgggattgccttgaggggcgggaggcaagagagatggaaaagatagacttgcttgttttatgcctctactgtcctgcaaaataggaattgtggtccctgtcttacagataaagaaactaaggcagaaggtcatggtggctcatgcctataatcccagcactttgggaggctgaggcaggcggatcacctgaggtcgggagttcaagaccagcctgaccaacatagagaaaccctgtctctactcaaaatacaaaaattagccgggcgtggtggcgcatgcctgaaatcccagctacttggaaggctgaggcaggagaatcgcttgaacccggggggcagaggttgcggcgaggcaagatcacgccactgcactccagcctgcgccaaaagagcaaaattctgtctcaaaaaaaaaaaaaaagaaactgaggctcagagaggatgacaagatcacaccatcagtaagaggcaaagccaggattcttcttttttttttgagacagaatctcactctgtcacccagcctgaactgcagtgttgcggtctctgctaactctactccgctaactttacctcctcttcccgggttcaagcgattctcctgcttcagcctcccaagtagctgggattaaaggtgtgtgccaacatgcccggctaatttttgtagttttagtagagatggagttttgccatattggccaggctggtctcaaacccctgacctcaagtgatccacctgcctcagcctcccaaagtgctgggattacaggcgtgagccaccgtgcccggccaaaagccaggattctaatgtgggtggttttctggcttcccagcacttgaccacgatgtcaccggcagccccgtgcctcctggtttgccactgacattaacccagttgcctgcccaatctgaaaaacttggcaaagcataaacctaaaattgtccaaggggcgggaggacagcaggaaatcgtggtgatctgtgaagagaaaggccacactgtccaaagcctgagaaacagctgctaagattagttttgagtcagcctaccctgtgacttggaacctgctcaatttcttttccagctcctgactcaggcaggcccacttcaactcaggggactgctcagcagtgtctgcctagcgttttaggcatcctggggacacgctccttgcttgacattgaactgtgcaggacgtggggatgctctgggctgtccgggaggcctgttgacaccccacagcatccccaggccaacagctgagatgcccacactccctttccacattccccacacagattggagaatttttcctccattaaagccgtccctggtacatggtacatggagcagggtcggagcagggtcaggacagagccaacggattggaaggcaggtgatttgggagtctctgctctggcaacacgcatggctcaagtgagaatgggtgttacacagcatctcccaagatcctcatgttacagttacccatgagaaaacagaggccacaacacaagtcacttgccagggtcagaagaccagtcagtagcagaaccaggacagaattccggccttctgattcctaatttagtgctcttccagctcaaataaaaggcagaccattcttggaaagactaatcactggaatattttttttcactgagaaaatattttcagaatttcaaggctacagtgagctgtgattttaccactgcattctagcctgggcagcacaacaagaccctgtctgaaaaatatatatatatatatatatatattttattttttttttcctctgatttcaatataattttcattttatttattttttgagatggattttttgtttgagatggagtcttgctctatcgcccaggctaaagtgcagtggcactgcctcagttcactgcgacctctgcctcctgggttcaagcaattctcctgcctcagcctcctgagtagctgagattacaggtacctgccaccacgcccggctaatttttgtatttttagtagagacgaggttttaccatgttgaccagcctggtctcgaactcctgacctcaggtgatccacccaccttggcctcccaaagtgctgggattacaggggtgagccaccatgcccagactgttttttgtgttcttagtagacacagggtttcaccatggttggccaggctggttttgaacttctgtcctcaagtgatccactcacctcagcctcccaaagtgttaggattacaggcatgagccaccatgcctagtctatttatttatttattattatttttgagaccgcctcactctgtcacccaggatggagtgcagtggcgtgatcttggctcactgcaacctctgcctcccgggttcaagggattcttgtgcctcagcctcccaagtaggtgtgactacaggcatgcaccaccatgcccagctaattttttgtattttagtagagacggggtttcaccatgttgcccaggatggtcttgaactcctgagctcaggtgatctgcccaccttggcctcccaaattgctgggattataggcgtgagccactgcgcctgaccacatataatttttattaattataatgttgaaagtccctttattccacacctctcctctcattcactcctgataggtcatttttaatgatttgatgtatatactgaatttggatgcttcttgctacagggcaaagacgctaataagattttgctggagccttttcacagatgcaagtcaatccaggcagtgtctatagctgctgaacccaaaatcagaaagcgagggctatcaaagctcttctgtcctgatttgcaactttagtagtgcaagaaaaaaaatcttagaataaaaaatgggtaccgttcagagacctttagagattgcaaggcatcacagatgataaaaagctccatctctagacgtgttcaggagtgggttggggctttgaccttgactagctgcatcaacttggacaagtcacttcgcttccctgtgcctcagtttcctcatccataaaatggggataagtatagtacctacctcataagtcctgcctacctggcacatggtgagcaattactaaattgtaggcctagtccctataatcccagcacttttggagaacaaggtaggggaatcgcttgaagccaggagttccagaccagcctggccaacatagtgagactgtgtttctataaaataaaaaaaaaaaatacccaagcttggtggtgcaggcctgtagtcccggctacttgggagtctgagtcaggaggattgcttgagcccaggagttcaaggttgtagtaagctatgattgcaccactgcactccagcctggcgacagagcatgaccctgtctctaaaaatataaaattaggccaggcacagtggttcatgcctgtaattccaacattttgggaggccaaggcaggtggatcactgtgagctcagcagttcgagaccagcctgggcaacaaggcaaaatcctgtctctactaaaattacaaaaattagccaggagaggtggtacacgcctgtaatcccagttactggggaagctgaagcaggagaattgcttgaacccgggaggcgaaggttgcagtgagccaagatcgtgccattgcactgcagcctaggagacagagcgagactcgatctcaataaataaataaattaattaattaataaaaaaataagttgggcatggtggcacctgcctgtagtccaagctactcaggaggctgaggtgggaggatcacttgagccaggagttctaggctgcagtgagctattatcacgccaccatactccagcctgctgtatgtactccagcctgggcaacagagtgacaccctgtctcaaagtaaagtaaaataaaaattaaaaaacaaattactaaattgtacttaacagtattgtcatcagtcttcctaaataggaggacaggcaaaattaagggacttaacatgtgccctcaggtatagtagtttggggcaggccagcatcacccgcacagtagttctgtactgtaggtgcgtgttctctgggtcaactttatggcccagtgaggccgtactctaccagaatgtcaggggacaagggttgggagaggcaaaagtgctggtctgaagcaggagtctgggtttccatcctagctctaccaccaattctgtatgaccgtgccccctccatttcctccatgaccacatagagacatggggcagttggatgaaatcaatgattcccagtcttggctctatcatggaaccatttgctaacttctttttttctcttatggatcccatatttttaaagatttttactaaatagaaattgacttatacttttccaagctggagtgtggtggcatgatttcagctcactgcaacctccgcctcccgggttcaagtgattctcctgcctcagcctcctgagtagctgggattataggtgctcaccaggcccggctaatttttttgtatttttagtagagacagaatttcaccatgttggccaggctgatttcaaactcctgacctcaagtgatctgctcacctcagcctcccaaagtgctgggattacaggcgtgagtcactatgcccagccgcttactcacattttctagtcaaaatagaaaactgcttaagtcactgtctgcagaagagcaaaaaaaaaaaaagaaataaaaaattgaaaactgctgatcagattgagaaaaacataagattattcaccacctaaagagaaaaaatttcagtcgaaagggaaaaaaattcatttttgtcttaataaggcaaattcacaatttttgaggttttaacaaaatatatgcagaaagacaaggccaccccgtagaacgtgcacacagccctaggcttggaaatggctggatttaataatatctggtctttctttgagccctgaaattctctaacactatgtcttggaacataattttactgttttcagtggttatagagatttgctttacaatttagcattggtctttacccatgattttgtttgacgccaacttgttgggcaggaatgcaccccctgccccccgctttgttatggccttgctcctatagggcaagaatatctgctttaaggccgggtgtggtggctcaggcctgtaatcccagcactttgaggggccaaggcgggcagatcacctgaggtcaggagtttgagaccagcctggccagtatggtgaaatcctgtctctactaaaaataacaaaaattagctgggtgtggtggcacacacctgtaatcccagctatttgggaggccgaaacaagagaaccacttgaacccaggaggcggaggttgcggtgagccgagattatgccactgcactccagcctgggaaacagagcaagattccgtctcacacacaaaaaatatatatatgtctgctttaagtatgcaggccgtgtttgtgctgaacggcaggaatgccaaacttggctgcatggtaccaactagggacctcagagttccaaggagaacaaacagttggttcctggaggctgggggcttgtatcagaccctgaagactaagcatgtgctgggtccattgttgtcctgcacccatggtagtgcactaaacacctaacctatatttaagtgtttttgtttgtccaaaaaatgtcttttttttttgggagtcaagagtcttgctctgttgcccaggctggagtgcagtgacacgatctcagctcactgcagcctccgcctcccgggttcaagctattctcctgtctcagcctcccaaatagctgagactataggcacgcacatccatgcccagctaatttttttatttttagtagagacgaggtgtctccatggtggccaggttggtcttgaactcctgtcctcaagtgatccacctgcctcggcctcccaaagtggtgggattgcaggcatgagacaccgcgcccggcctgccttgtcccttcttaaaatgagttgtccatttgtaagctgctgatttctttgggacattgtctccgtaaacttttcataaagcatcagtgatttcaccattcttccacccaagcttcaccgtaaatttgttgtttgttcttgcttcaatttcagcagaattcatttagctctgataagggctcgcttcaaactgatgtcttatccttcttagtgcctcaaactacatcctgttcactcatgttatagcaagttagtgtgagtttattttggtgcacaaaaatttttttaaatccatgcagtcttttttcataatacgcattttccatgaacttttcgaagaccccttgtagatgtctgttgtttaaaccacccagtttacagtaatttttttttttttttgagatgaagtcttgctctgtcgcccaggctggagtgcattggcacactctcggctcactgcaacctctgcctcctgggttcaagcaatttttctgtctcagtctcccgagtagctgggattacaggtgtgtgccaccatgcctagctaatttatgtgtttttagtagagacggggtttcactatgttggccaggctggtctcgaactcctcaccttgtgatcggcccgcctcggcctcccaaagtattgggattacaggcgtgagccactgcacctggcctacagtaattttatagcagcccaggctaagatagccatttctgggtataagaatgtcatatactgaacaggcctgcaactgtgagtaaaagtctgcaaagaggccgggcagtggctcatacctgtaatcccagcactttggggggccgaggcaggtggatcacctgaggtcagcagttcgagaccagcctgaccaacatggtgaaaccccatctctactaaaaatacaaaattagctgggcgtggtagtgcatgcttgtaatccctagcatgcacttgggagctacttgggaggctgaggcaggagaatcacttgtactcaggaggccgaggttgcagtgagctgagatcacgccactgcactcctttctgggtgacagagtgagactccatctcaaaaaaacaaaacaaaacaaaacaaaaacaaacaaaaaaacccaacaggtaggtagcagtggttcacgcctgtaatccccactttgggaggctaaagtgggcagatcacctgaggtcaggagttcacgtccagcctgggcaacatggtgaaactctgtctctacaaaaatacaaaaattagccaggcatgatggcgggtgcctgtagttccagctattcgggaggctgaggcaggagaatcgcttgaacctaggaggtagaggttgcagtgagccgagttcacgctattgcactccagcctccatctcaaaaacaaaacaacaaaaacccaaaatatatattataattttattttatttattcaattttattttattttattttatttttctaggaacaggtctcattcaggccaggcatggtggctcacgcctgtaatcccagcacttgggaggccgaggtggaggtgggcggatcacctgaggtcaggagttcgagaccatcctggtcaatgtggcgaaaccccatctctactaaaaatacaaaaattagccaggtgtggtggcacacgcctgtaattccagctacttgggatactgagtcaggagaatcacttgaacagggagatggaaattgcagtgagccgagattgttccactgcactccagcctgggtgacagggcgagactccgtctcaaaaaaaaaaaaaaaaaagaaagaaagaaagaaagaaagaaacaggatcttactctgttacccaggctggagtacagtggtgcaatcatagctcactgcagcctggaactcctgggctcaagtgatcctcctgcctcagcctcctcagtagctcagactgcaggcatgcaccaccattcccagctaatttttaatttttttttggtagagatgagggtcttgctatgttgcccaggctggtctcaaactcctggcctcaagcgatcctgccatgtcggcctcccaaagtgttgggattacaagtgtgagccactatgcctggcctaaaaatatatatatgaaaatatataagaaatgggcctcccaggaattaaggtgtttgcgggagtcctggtccccagtttttctgccaacactccctgttcccacacatgacctggtccagaccccaaacagccaggcccaaaggacaggtgaggcgaggcgagaacttgtgcctccccgtgttcctgctctttgtccctctgtcctacttagactaatatttgccttgggtactgcaaacaggaaatgggggagggacaggagtagggcggagggtagggtaggaccagaagcctctctaggcctgccatggggcaggcagccagggagaaggagggcccctcagtggagacccagggatttcagtagcccctgttccgggacaggcgcaggtcctgggaggtgacagaagatagactaaaggcccaagagtccctggacctgactcctcccaggcagctgccacacacaaacacacctccaggcaccctggacaggaaggaggagaaatgggcccctcctccagtggctgagaagctggggcaaatgttggctgttcctatccctggtgcatcccatggcgaggggcaacttccatcaggccacaccttttatctttgtctctatttttgatatctgtgtattatgattatacaaacccccacattggcctatatgtgcagatctgattaagaacttacgatattccatggacattccattcctaatctcctttagtcctcacaacaaagtattattcccattgtatagatgaggaaactgaggcacacagagatgacaagcaaccaccgctatatgttaggattcgaaggagctccaggaaagtctcatagccccactggccagaatgggctaaatctcagagggggagggtgggagatgggggtgacagtgaccttttttgtgactcctcctagaccatccatccctgctcccaggaggacctgtcctcccagatggtggagatggacaggaggactatctacccacccgtccccacggccctgaccctctgacctcaccctctccgctgatttcttcatgttagttcaacattaacccagaggggtcaggacagacaattcctcagtgacccaggagctgacacactatggcgcacgtccgaggcttgcagctgcctggctgcctggccctggctgccctgtgtagccttgtgcacagccagcatggtaagggagtgcttgcaggctggaacaggctggaggactggggtgtgggcccatgggctggggtctcctggctggacagagcacacagagctggcccctaagtaggtctcagccccaggcggccagcttagggaagaagtcaggagctcagggctggaaagagaatggctgcttctctcttccaatatagggagcaggctgggggcaaggggcagtgtaggaggggcacagggggccacatttagcagccttccaggcacttccaccagcccagacagcctctctcagaagccagcaggggagggtgggcttgcttcatgcccccagaatggccaagactgcctgttcctgaggccgctgtcccatgacccccccaccgccttacagtgttcctggctcctcagcaagcacggtcgctgctccagcgggtccggcgagccaacaccttcttggaggaggtgcgcaagggcaacctggagcgagagtgcgtggaggagacgtgcagctacgaggaggccttcgaggctctggagtcctccacggctacggtgagcctgggctgctcggacggtgccggggcctcagaccgggcccaactctagacacttccacagagaagcaagcgaggaacgccacagccccttcgctgctcacagcctcatttcaactctgagcccctcctcacagggctggcaagaggagcggcctcagcctttcctgggggtctctgtgcctggactgtgtccctgtgcagctccatgacatggggaggcctccacagtcttcagacatccacctgccctggagctctgtgtccacatggcctcctcagcggcagactcccacaccacccttgaggggtgggactctggggaggccaccacaagcccccgggctcaagactcagtgttcctggagctctgtgtcgcctttcctgtctgtagggctctgccagggtcccactgccccctctcctcccatctcccccagcctctttcagtctcggtgtgtgtgttggaggaactcccctatcctcaaatattcttctccttttggaaacaaaagtaggaaactctgccacaaacctccccagagcctgccccctgcgtgaccagggtaaaggaaagtgtgaggaggagacataacatttactaaaacaacacaaaacaggagctgccgtagcctcactcccagcccttgtttttcaggatgtgttctgggccaagtacacaggtgagcaccgggaaggatttgccccaggaagggaggcctggggaccccagtgagagaattctacccagagaatcttctgctgcacctagccatccacccatccaccccttccccactccttccttggtccctcccatctgttcatccatctttctgtttctcaccaacatcccatccaccctgactccagctcatcctggccataccccaatcccaaaggtaaacacctgggtcttttccagcttgtgagacagcgaggacgcctcgagataagcttgctgcatgtctggaaggtgagcaactgacacgggtttggggagcaggacatggaggggagcctgggagaagagctcaggggtgggtttggagtgtggctggtggaggccgaggcagtccccagcatctgacattgctcccattcctggggtcaagatgtctctttgtacctggctctgtgtctggcatgcgaacgaatgaatgaatgaatggactaatgaattaatgtttttttttttgagacagagtctcgctctgttgcccaggctggagtgcagtggcacgatcttggctcactgtaaactccgcctcccgggttcaagcaattctctgcctcaacctcccaagtagctgggattacaggtgctcgccaccacgcctggctaatttttgtatttttagtagagacggggtttcaccatgttggccaggctggtcttgaactcctgacctcgtgatccacccacctcggcctcaaagtgctgggattatagaagtgagccaccgcgcctggccatgaattcatgtttaaggcttcattctcctttgcctgacccgagtctctgcccccacctagtcagagctttgatgatgtcacattccccttctagctttaggtgtcactgaaccaaacaggaacccaaacccccagctgctctgacaccaaggacttccctaagcatgccaaggtgtttctagcacctggccttgcatatgttgtcaatttcctctggagcgaccatcacatctactgaacactttcctatccttcaaggactgcttcaaatgtcaccacttttgctgagacttcagggagcaccctccctcctgcactgtgttctgaaggcacctttagcacgacaaaaatggaactctttgtttatttataagagacagggtctcccttttttgcccaggctgatcttgaactcctgggctcaggcaattctcccatctcagtctcccaaaggagtaggattataagtgtgagccaccatgcctggctgccatactttcatttttttttttttttttttgaggtggagtctcactctgtcgcctaggctggagtgcagcagcgcgatctcggctcgctgcaacctccgcctagcggattcaagtgattctcctgccttagcctcctgagtagctgggattacaggcacacactaccatgcccagctaattttttgtattttttagtagagacggggtttcaccatgttggccaggctggtcacaaactcctgacctcaggtgatccaccagcctcagcctcccagagtgctgggattacaggtgtaatccactgcgcccagcctcatttgttaaattacgtactcaacagacattttacaaagttcctgctacgtgccaggcactatatcaggtgctggggattttaagagaatcaaatacagtctctgccttcaaggaattcaaaatctcaaaagagaacaaaaatacaaaatattaaaatgattgcggccgggtgtggtggctcaagcctgtaatcctagcactttgggagctgaggtgggcgcccaggccaggggtttgagaccatcctggccaacatagtgaaacccccaacctctactaaaaatacaaaaattagctggggtgtggtggcacgcgcctgtaatcctagctactagggaggctgatgggggagaatttcttgaatctgggaggcagaggttgcagtgagctgagatcatgccactgcacttcagtctcggcaacagaacaagactcatctcaaaatacataaataaaaataaataattcaataaagtgattgcaagaaaagttctgttcaaggcaccaagagaccacaggaaaatgagtgtctggtttgccagaaaaatgagagatggcttcccaggagaggcagagttctgcctggcctggtgggatgcatggatgaacaaacaagtgggcattccagtcagaagaaacaatccgtggaaagacccagaggcatgagaagctgagctagcagggacaggtagaccagggccagttgaaaaggaccttcatcactttttcatcctgctggccaagagaagccacagaatggaagctccatgagggcagggctgtgactgtcctattggttgatgtgtactgagcacccgacagtgcctgtcatatggtaggcacttagcgaatatttggaggccactgttgagtgaatgggagaactgctggttgcagaggaagaggggctgggtgaatgcaggttcaggattgtggacctgcatgagctgggaggtgggggatagacaactttgcagggagagaggaaataagtccccaggctccaaggctgaccggggtggggtctccgcaggtaactgtgctgagggtctgggtacgaactaccgagggcatgtgaacatcacccggtcaggcattgagtgccagctatggaggagtcgctacccacataagcctgagtgagtgaggggccggccttcccaccatgggctgagaacagggagcaagcgtacctcaagcccaacagcctcctgttgggcaatttcctgttccagaatcaactccactacccatcctggggccgacctacaggagaatttctgccgcaaccccgacagcagcaccacgggaccctggtgctacactacagaccccaccgtgaggaggcaggaatgcagcatccctgtctgtggtaagctgggggcagtggggcggcccatggccaaggcccgggggcttcatggggcctggcagcctgggatgggaaccaagaatactggctacccaggcacagtggctcatgcccgtaatcccagcactttgggaggctgaggcaggcagatcacctgaggtcaggggtttgagaccagctgggccaacatggcaaaaccccgtctctactaaaaatacaaaaattgccaggcgtggtggtgggcgcctgtaatcccaactactctggaggctgaggcacgagaatcgcttgaacccgggaggcggagtttgcagtgagctgagatcctgccactgtacttcagcctgggcgacaagagcaaaactctgtctcaaagaaaaaaaaaagatgctggccaccttcagagctggcgtcagtcattcagatcatatctgtgcctattgctcagtaaagtcagggaatcaggggatctgagtggggggatctgccagcctcctcctccccctccccactcttgacttccttatggtccaggctgtggctcattccaaacatgcctcctttctgatcaaggcactcctccctccgggaagccctccctagccatttcagtccacacaccctgttctgagtatcacagagcaagccttgtgcagtttggccctgcgggattctgtcattattatttccttggtgtgttaagtagctatagccaccccttccctgaggcagaccacaataagcatttctttttcccatgagggttggcaggtgtggctgcactcgctaatgcgtctgtagggtcaactgacggaggttggccctggctgggtggctctgattcaaataatgggtccagctgagtctggctcctcgttgagggttgggcctagatctgctccacgtgcgttcatgctggggctgaggctgaaagaaggtacctgggaaaactcttcttatgctgatgacagacacagaaaacaatgaacagaaaagcgtcttctgtcctgaaggcctggctcagaacaggcacagtcagccctgcccacgttccattggccagagcaagtatatgttcaaggccagggtcaagaggtaaactacacctcagcctgtaaaatcacagagcaagggatgtggatgcaggcaggggtaaagaatttgtgccgattaccagtccacaaacatgggttagtgtttgttctctaggcatccctgtcgggcccattgctcattcctggggttggtcttttttttttttctttctaagatggagtctcactcccttgcccaggctgttggagtgcagtggccctatctcagctcactgcaacctccgcctcctgggttcaagcgattcccctgcttcagcctcctgagtagctaggattacaggcgtgtgccaccactcctggctaatttttttttatgttagtagagacggggtttcaccatgttggccaggctgatctcaaactcctgaccttgtgatcctcccgcctcggcctcccaaactgctgagattacaggggtgaggcactgcgcccggccttttttttttttttttttgagatggagtctcactctgtcacccaggctggagtgcagtggcataatcttggctcactgcaacctccacctcctgggttcaggcgattctctgcctcagcctctcatatagctgggattacaggcacacgccaccacgcctggctaatttttgtatttttagtagagacggggtttcttcatgttggcctggctgatcttgaactcctgacctccggtgatctgcccagctcggcctcccaaagttctgggattacaggtgtaagccactgcgcctggcccctggaattggtcttatagcaagtttatcccaacaaaaacagctactatttactccccaacccccatacacacgcacacacattgatgataaataagttgcaggcttgcagaaattgacccatccaggtgaacagcctagtgatcccagcaagcgtcctgctgtgcagctataaaaacatgactcctccagcagctccaggcagccactaccagttaattacagatggcctaggaggccaaacctggttactatctctggtttattatgtgccagacacttatgctgtatattttgtttaatcctctcaacaaacctgcaaaagtggcattagtaacccctttaaaggcaaacggtcagaagcccagagaggttaagtaacctgaggtcacacaggcagaaagcagcaagaccggggttcacacccctgtctgttccggtccatgtgtggtctcactcactctgctgcctccttgcccctcacccaccaggccaggatcaagtcactgtagcgatgactccacgctccgaaggctccagtgtgaatctgtcacctccattggagcagtgtgtccctgatcgggggcagcagtaccaggggcgcctggcggtgaccacacatgggctcccctgcctggcctgggccagcgcacaggccaaggccctgagcaagcaccaggacttcaactcagctgtgcagctggtggagaacttctgccgcaacccagacggggatgaggagggcgtgtggtgctatgtggccgggaagcctggcgactttgggtactgcgacctcaactattgtggtgagctgcctgggtagggggcctgagttgcagggacaaatcctggtgggaataacaacagccgcttctgcttatcgaacgcttacctcattgagtgcgctcattacagccttacagtaaccaggtggggggtaaggtcctgtgcccatttcacagataagtacactgaggccccaggaggttattgcctagtagcccaactgtgcatgcacgcttaacctctgcaccaaatggcctccaaggcccgtaggggaattggggggatctaggggatgggtgaggaatggcccagcccagtcccagccggtgcctgggtcccaacagaggaggccgtggaggaggagacaggagatgggctggatgaggactcagacagggccatcgaagggcgtaccgccaccagtgagtaccagactttcttcaatccgaggacctttggctcgggagaggcaggtgaggtagtgggcatccgaggggatgcggggctgcggggctggtggccaggacttgcccctcactgcttggcttgctctgcagactgtgggctgcgacctctgttcgagaagaagtcgctggaggacaaaaccgaaagagagctcctggaatcctacatcgacgggcgcattgtggagggctcggatgcagagatcggcatgtcaccttggtgtgtcctggagccctgcgctaccattcactcctgggggcaggtgtgctgctggacccccaccctcaggccctgcctgcaggcctgggctttacagatgacaacagctgagcatccaggatcccaccaactccacacagcagccacatgagatgggttgtttacttctttttttttgtttcttagatggagtcttgctctgtcacctaggctggagtgcagtgctgcaatctcggctcactacctcgatctcagctcactgcaacttctgccttccgggttcaaacgattctcttgcctcagcctcctgagtagctgaatttacagacatgcgccaccacacccggctaatttttgtattttaagtagagacagggtttcaccatgttggccaggctggtcttgaactcctgacctcaagtgatccacctgcctcagcctcccaaagtgccgggattacaggcatgagccaccacacccggcccatgggtcctttacttctaagcagatggtaaagctgagactgacggagctggtggctcacctccgcgcacagctaatgggtttgaatccagttcttctgattccagagctgtgctacgctatgtgaactctggactggaaggacctagttagggggtgcaaaaagcaggaggcaggtcaggtgcagtggctcacccctgtaatcccagcactttgggaggccaagacaggaagatcacttgagggcaggagttcgaggccagcctgggcaaaatggtaaaaccccgtctctactaaaaatgcaaaaattagccaggtgtagcagcatgtccctgtagtcccagctactaaggaggctgaggcgggaggatcgcctgagcccaggaggctgaggcttcagtaagctgtgactgtaccattgcactccagcctgggtgacaagagtgagaccctgtctcaaaaataaataaataaataaataaaaaagtgtgaggcagcccctcagcatcacacggaggctccaggccccaaaggcggccagcccaagcttggatctgggccccggaggcagctctgcccagctgggttcttagacctgggattgttacttctagggctggtgtagaggcagccccctcatcctcagctcctaatgcttcctgctgcccctcccaggcaggtgatgcttttccggaagagtccccaggagctgctgtgtggggccagcctcatcagtgaccgctgggtcctcaccgccgcccactgcctcctgtacccgccctgggacaagaacttcaccgagaatgaccttctggtgcgcattggcaagcactcccgcaccaggtacagaactggtggcccgtgggtgtctggcaggggtctgagtcctccaaagcgatcatgaggggccctggtggctccgggacacataggatgttctgtataccccccagaatataacatcccagcagtctctgctggaaagcccatttggtcacgtcctgactgaggcttggagctgcggggagaaatccgtctgtctcctggtccctccaacactaggatatagcccatgtgggagtctctgaaaatagagtctgtctggactagggcgtgcagcctgtgcccctgtccccgtcctccaggctgtctgactccaaagccctgcacggctttaggcccaggaagaaacacccagggggctgccatggcaggaaccagccctatcccctccctggtggcctgcaggacacactgtctcccagaccccaagggcaggcagtttcctgctccttgctgggtgaacctgcagcttctccatttctttcttggggtctctgcaggtacgagcgaaacattgaaaagatatccatgttggaaaagatctacatccaccccaggtacaactggcgggagaacctggaccgggacattgccctgatgaagctgaagaagcctgttgccttcagtgactacattcaccctgtgtgtctgcccgacagggagacggcagccaggtgggccaccagatgcttgttagctgaggggcagaagccaagttctgggcctggctctgataccaagtagccttgcaagagcccctttcccttttccaggcctcggtttcttggagtgaacccaaaagttcttttcagtactggcgttttattttttatttatatttatttatttactgacggagttccactcttgtctcccaggctggagtgtagttgtgcgatcttggctcactgcaaccccacctcctgggttcaagcgactctcctgcctcagtctcctgagtagctgggattacaggctaatttttgtatttttagtagagactggtgggtttcaccgtgtcggccaggttggtctcgaacccctgacctcaagtgattcacccgcctcggcctcccaaagtgccgagaccacaggcgtgaacgtctgtgcccagccagctctggcgttttagattctggtctctaagaaatggcgttggggccaggcggctcctgtgggggttggctctcactaggcccttcttccttccccaaagcttgctccaggctggatacaaggggcgggtgacaggctggggcaacctgaaggagacgtggacagccaacgttggtaaggggcagcccagtgtcctgcaggtggtgaacctgcccattgtggagcggccggtctgcaaggactccacccggatccgcatcactgacaacatgttctgtgctggcaagtctgtgcagggcgggctgagggaacagtggggcccaagctgggagaactgagttgtgcctgggttcaagccatgtgactttgagcaagttgcctaacctcttggtggctcagtttcttcctctgtaaaatggaggtaaaagtctctatcccataaggttatgggagggttaaatgaagtagtatatattaatgtacttggcatagtatcagtcaccagtgagctcagatagcagcaagaggctgcgggtagggaaatgccattcattcagtcactcagcaaatatttattgagcgcctatcacgttccaggcagcgttctagggtatacagcagggacccagacggacaatgtctgtgccctcagagagcttccttcctaggagggcacatccataaacagatctaaaacagcaatccctgaccagtgctgtgaagaaaaatgaagcacagggagagagaacggctgatgaagtgggcttctaaatagggtggccagacaaggtgggcagatcacttgaggtcaggagttcaagaccagcctggccaacatggtgaaaccccgtctctactaaaaatacaaaaattagctggtcatggtgacgcatgcctgtagtcgcagctactcaggaggctgaggcaggagaattgcttgagccagggaggcggaggttgcagtgagctgagatcgggcatcattgcactccagctgggcaacacagcaagactccattgatcgatcgatcaatcaatcaatcaggtggccagagaaggttggagaaggcctccctgagaaggtgatgtctgggcagggactggaagaggggaaggaaggagtgagcaggcatatctaggggaggagcaccgcaggctgggggcatggcaggcactaaggccctgaggtgggagcactcttggcttgtctggggagcagtagggaggcctggggggctgaggaggggcagcagtgggtgaggggagagaggggggcaggcagaggacagccacttcctttagggcctggaaggactttattgagtgagatgggaagttattgaggggcttgaggcaggttaagaaatgatgtgactgactttaaaagtaaaaaataaaaaaatttagtgtaatttcagactcacagaaaagttgtaaaaataatacaaagatttcctgtatactgtcatccagattgtcctccattctgtggatgtgtgggaatttttatatatatatatgcatagtttgagagcaaatcatgaatatggtttctttttacccataaatacttgagtatttccaaaaaaaaaaaaaatacccaaggatgttctcttatgcaaccacaatacaaatattaaaacccggaaatttttttttgacatagcttcgctgtcacccaggcttgagtgcagtggcacaatctcggctcactgcaacctcctgctcccaggttcaagtgattctcctgcctcagcctcctgagtagctggaatcacaggcatgtactaccatgcctagctaatttttgtatttgtagtagagacagggtttcaccatgttggccaggctggtcttgaactcctgacctcaggtgatccacctgcctcggcctcccaaagtgctgggattacaggcgtgaaccactgtactcggccaaaaccaggaaatttttttttttttttgagatggaatcttgctctgttgcccaggctagagtgcagtggcatggtctcggcttacttggaattacaggtgcctgccaccacgcccggctaactttttgtatttttagtatttttagtagtgatggggtttcaccatgttggccaggctggtcttgaactcctgacctcgggtaatccacccacctcggcttcccaaagtgctgggattacaggcgtgagccacagcacctggcccaaaaccaggaaattaatgatgatacaatattattgtctaatctatagaccttattcaaatttttgttagtcttgctaatgtcttttatagggaaaaaaaaaaaaaaaagcgtgtttctcacccaggattcaatgaaggatctttctttgtcttctatgaccttgacatgtctgatgagtgcagtctggttattttgtacactggccctgaatccgggtttgtctaaggtttcctcacggtcaggttcgggctcagtggtgccatgtccttcttggtgcatcctgttaactggcacatgagaacaatttgtctcatatgtggtgagtctaactctgacctcttgaggaaggcaatgtctgccaagtttcttgctgtaacttctgtttttccctttgtaattaataagaatctggtaaagagacactttgatgttttttttttttttttttttttgtgatggagtctccctctatcacccgggctggagtgtgtggtgcgatctcggctcactgcaacctccatcccccaggttcaagtgattctcctgcctcagcctcccaagtagcagggattacaggcatgtgccaccacacccagctaatttttgtatttttagtagagatggggtttcaccatgttggccaggatggtctcgaactcctgaccttgtgatccgtctgcctcagcctcccaaagtgctgggattacaggtgtgagccaatacgcctggcctactttgatattttgtattctgtttgcatcaaaaccttctcccaactagggtgactaccaaatggcacttatctaattctgtcattccttctacatttgttagttactttattgctttccttcctttcattctatcagtgtggacttaaggatccttactttattctaagggttcacctttttttttctttttttttgagatggagtttcgcccatgttgcccaggctggatggagtgcaatggcgtgatctcggctcactgcaacgtcctcctcccaggttcaagcaattctcctgcctcagcctcctgagtagctgggattacaggcatgtgccaccacgcctggctaattttttgtatttttagtagagacagggtttcaccatgttggccaggctggtctcgaactcctgacctcaggtgatccgcccgcctcagccttccaaggttctgggattataggcgtgagctctaccgtgccaggccatactttgttactactgttattttttctgatgctcagatgatcccaagtttggcctgtggaagtcccttcaagctggcttctgtgacttggggagatgttctgtcattctttgagtactttctttctttctggcacagcaaaatgattcaggttaatcctactttccttactgtagtgttggaaccagccatttctccagggaacccttgtagtcaagagtggaatttagaactgagatctgggtgctggcgtgtgcacattgctagtgggatgtcattacttctaggctctcttagtggacagaaccagaaaaaaattatatgatgcatataccaatatctctatcatctatataaaaaaccatgagttcctactgaaacctccaattccattctaacaccacaggattaattttagcttttccttttccatatttgtaactctctctgttgacagtgagaaacctgaccctcattatctgtaatgcatttgcctatttgaacaatactagaatatagtttcaaaatcctccatccataacactattaaaaccaatcctatggctgggctcagcccactgcaacctctgcctcctggactcaagccagcctcccactttagcctcccgagtagccagggctacaggcacacaccaccatgcccagctaatttttgtattttttgtagagactgggtctcactgtgttgcccagacaggtcttgaactctgagctcaagtgatccatccaactcagcctcccaaagtgctaggattacaggtgtgagccaccatgcctggcctctcctagtaaatttttagaagtggtgttgttaggtcaaaaggcaaacatgtatgtcattttttagagatttttaaatttctttccataagggttgtaccagtttgcatttccatcacagtgtatgagaatgcctgtttccccacaaccttgccaaaagaatgtcacagttttaaatttttaccaatctgagaggtgagaaatagtatcttgaaattgttttaacggacatctttcaaattgaaaatgaggttgaacatcgtatcatatgattaaggaccttttttttttttttttttttttttgagatggagtctccctctgtcacctaggctggagtgcaatggcacgattttggctcactgcaacttccgccttctgggttcaagcgattctcctgcttcagcctcccaagcagctgggactccaggcgcgagtcaccatgcccgctaatttttgtatttttagtagagacagggttttaccagattggccaggctggtctcgaactccttaccttgtgatcctcccgcctcggcctcccaaagtgctgagattacaggcatgagccaccacgcctggcctaaggaccatttttatataattttttttttgagacagagtcttgctttgtcacccaggctggagtgcaatggtgcaatcttggctcactgcagcctccacttccctggttcaagtgattctcctgcctcagcctcccgagtagctggttccacaggtgcgtgcctggctagtatttgtattatataatttttttgtgaattgtctcttcatggttttttgcccattttttggtccctttcttatcaatttttgtgagttcttcgtatttatattaggcctttatttgtgatatacattgcaaatgttttctcctagtttgtcagtttttttaacctcatgtataatttttctggccatgcagtttaaaaaattactaggtagtcaaatttatcaatcatttattttattaaatctggattttgaatcagagataaacttttcctggccaggtgtggtgtcttacacctgtaatcccagcactctgagaggctgaggtgggggatcacctgaggtcagaagttcaagaccagcctggccaacatggtgaaaccctgtctctactaaaaatacaaaaattagctgggcgtggtggctgatgcctgtagtcccagctactcaggagactgaggctggagaattgcttgaacctgggaggcggaggttgcagtgagcagagatcgtgccgctgcactccagcctgggtgacagagcaagactctgtctcaaaaacaaaacgacaaaaaacaacaacagaaaagcctttcctgatagctaggtcattgaggaattcactcatgttttcttctagtacctgatttcatttttctgcacttagattcctgactcatatggagtttatttttgtatctgatgtgaggcatagatctaatttattattttccaaatggctaactagctgtctctaaaccctttattaaaaattattggccaagtgcggtagctcacacctgtaatcccagcagtttggaaggctgaggcaggattgcttgaggccaggaattcaaaaccagcccagacaacatagcaagaccctgtctctacaagaaaatattggtcaggtgtggtggctcacgcctataatcccagcactttgggaggctgaggcaggtggatcatgaggtcaggagatagagaccatcctggccaacatggtgaaaccctcgtctctactaaaatacaaaaaattagctgggtgtggtggcgcatgcctgtagtaccagctactcaggaggctgaggcaggggaatcatttgaacccaggaggtggaggttgcagtgagctgagatcacgccattgaactccagcctggcgacagagcaagactccatctcaaaaaaaaaaggaaaaagaaaatattttaaaaattagctgggcatggtggcatgtgccttgtagtctcagctacttgagaggctgagttaggaggattgcttgagcctaggagttcaatactgcagtgagctatgaccgcaccattgcactccagcctgggcaacagagtgagaccctgtttctattaaaaaaaaaaaatcggctgggcgcggtggctcacgcctgtaatcctagcactttgggaggccgaggcgagcggatcacctgaggtcaggagttcaagaccagcctgaccaacatggaaaaaccctgtctctgctaaaaatacaaaattagccagacatggaggcacatgtctgtaatcccagctactcgggaggctgaggcaggagaatcgcttgaacctgggagacggaggttgcagtgagctgagatccctccattgcactccagcctgggcaacaagagtaaaaactccgtttcgccaggtgcggtggctcacacctgtaatcccagcactttgggaggccgaggtgggtggatcacaaggtcaggagtttgagacaagcctggccgacatggtgaaaccccatctctactaaaatacaaaaaattagcctggcatggtggtgtgcgcctgtaatcccagctacttgggaggctgaggcaggggaatcacttgaacctgggaggaggaggttgcagtgagccgagatggtgccactgcactccagcctggcaacagagcgagactctatctcaaaatcaatcaatcaatcaatcaatctttgaactagtgatttgagatttcacctttatcacattctagattgtatcttattttcatttatttatttgaaatatagacaagtctccctgtgctgcccaggctgatttcaaactcctggctgggctcgagcaagtctcccgccttggcctcccaaactgctgggattacagacgtgagccaccatacctgacctaggttttattttttagttttattttttcctgcatccagctaatttgatttgatttgtagagacggggtcttgctatgttacctaggctggtctcgaactcctgggctcaagtgatcctcctgccttggcctcccaaagtgttgggattaccagcatgagccacggtgcccagccccacgttctagatttctatggatagagtatgcttaaggatgagtatgtttctggatgttcgactcggctttcctggtctgttgtctgtctgtgtacagcgtcacattgttttaatgatagaggctttagcgtacatagctgggaaggctaatgttctcttttagtttttctttccagtggtttcctggcaattcttgcatgtttgtttttccatatgaactttagtgtcaacatgcctaggtctataaaaaagcttggtggtaattttattgggattatgacacttcaacaaattaactgggagaatggacatatttttgatgttgagtcattttatccaaggataagaaacgttttcctatttgctcaagtctattattgtatctttcttgactgctgcaatgtattctcttataattttttctattggtatcttattttatgtatttgtaatatcttatttttcttgagtaaattagttaatggcttgccggttttctcaaaacaaatatctagggatttgatttatgaaattattaggcctattatttttcttttttttgagatggagtctcactctgtcgcccaggctggagtgcagtggcgtgatctcagctcactgcaacctccacctcctgggttcaagtgattctcctgcctcagcctccccagtagctggggttacaggtgcacgccaccatgcccggctaatttttttatatttttagtagagacggggtttcaccatgttagccaggctggtctcgaactcctgacctcatgatccgactgcctcagcctcccaaagtgctgggattacaggtgtgagccaccgtgcctggcctttttttttttttttttgagacagagtcttgctctgtcacccaggctggagtgcagtggtgcgatctcggctcactgaaagctccacctcccgggttcacgccatcctcctgcctcagcctcccgagtagctgggactacaggtgtacactgccacgcccagctaattttttgtatttagtagagacagggtttcaccgcgttcgccaggatggtctcgatctcctgaccttgtgatccgcctgcctcagcctcccaaagtgctggtattacgggcgtgagccactgcgcccggccaggcctattatttttctattgtggttcattaatttctgcttttttctcttaaaaagtttgcttacgtttttgtctggtttactttgctgttctcttgctagcttttttttttttcagatagggtcttgctctgttgcccaggctggagtgcagtggcacagtcatagctcactgcagccttgaactcctgggctcaagcaatcctcttcttgcttcagcctcccacgtagctaggatcagaggtacatgccaccatgtccggctaatttttttttttcgagacagagtcttgttctgtcgctcaggcggtagtgcagtggtgcaatcccggctcactgcaacctccacctccacctcccaggttcaagcaattctacctcagtctcctgagtagctgggattataggcgcacaccaacatgtctggctaatttttgtatttttagtagagacagggtttcaccacgttggccaggctggtcttaaactcctgacttcatgatccgcccgccttggcctcccaaagtgctgagattacaggtgtgagccacagcacctagtgaaggtgtggtttttttgtgtaggttttactgttgttagtgttgttctgtattgtttgtagaggatacgtggggagatttggataaaagcaactatcattattatcctcatcagacttgtaggtctaactttttaattttttaatttttaatttaaatttttttcttggtcttttatcattaattaattttttcgagacagggtctcactctgttgcccaggctggagtgtggtgacatgatcacggctcactgcagccttaacctcccaggcgcaagtgatcctcctctcttagcctcccgagtagctgggactccaggcatgtgccaccatgcccagctaattttttgtagagagagggttttgccatattgcccaggctggtcttgaactgctgagctcaagtgatccacccggcttgggcatgagccacctcccctggtctggtccaactttttaaaagcattattctgcctgttgggtggagaatagactgtaggtgggcaaagaatgaaggaaactagtgggttcaggagctcgagctagaagtggtgagaagggtttggatttggggtctatgctgaaggtagagccgacaagatttgctaggattggatgggtagggtgaggaagtggggacagcaagaatgactggaggggtaagtggactctcaccagctgtgtctcgtgaaggggcgtggctgggctatgagctatgctcctgagcacagacggctgttctctttcaaggttacaagcctgatgaagggaaacgaggggatgcctgtgaaggtgacagtgggggaccctttgtcatgaaggtaagcttctctaaagcccagggcctggtgaacacatcttctgggggtggggagaaactctagtatctagaaacagttgcctggcaggggaatactgatgtgaccttgaacttgactctattggaaacctcatctttcttcttcagagcccctttaacaaccgctggtatcaaatgggcatcgtctcatggggtgaaggctgtgaccgggatgggaaatatggcttctacacacatgtgttccgcctgaagaagtggatacagaaggtcattgatcagtttggagagtagggggccactcatattctgggctcctggaaccaatcccgtgaaagaattatttttgtgtttctaaaactatggttcccaataaaagtgactctcagcgagcctcaatgctcccagtgctattcatgggcagctctctgggctcaggaagagccagtaatactactggataaagaagacttaagaatccaccacctggtgcacgctggtagtccgagcactcgggaggctgaggtgggaggatcgcttgagcccaggaggtggaggctgcagtgagccactgcaccccagcctgggtgacagagtgagaccctgtcccaaaagaatccactatctatcttcagagcagggccaggtgagaggaaagatggcaggttgaatttacaggcattaaagatgttccaccctctgggttttaatggattatctcatttaatcctcacaagaggtaggtgagtaaactgagatttggagaagtaccttgtccaaagtcacatggctaagaaagctcaaagtaggacttcaaatatagaaaatattgagtgaggacggtgcttttttagttaactccctacatcttcccttgtatcattaaaatgatatcagatcaggtagggcatggtggctcacacctgtaatctcagcaatttaggagactaaggttgaggctaggaatgcgagatcagtctgggcaatgtggtgagaccccaaaaaataaaattagctaggcgtggtggcatgtgcctgtagtcaaggttacttgggaggatcacttgagcccaggaggttgaggctgcagtgagccatgatcatgtcactacacctgcactgcagcctgggtgacagtgaaaccctgtttataaaaatcagggctgggcacggtggctcaagcctgtaatcccagcactttgggaggctgaggtggatggatcacaaggtcaggagattgagaccatcctggtgaacacggtgaaaccctgtctctaccaaaaatacaaaaaattagccaggcgtggtggtggacgcctgtagtcccagctacgtgggaggctgaggcaggagaatggcatgaacctgggaggtggagcttgcagtgagacaagattgcaccactgcactccagcctgggcgacagagcgactctgtctcaaaaagaagaagaaccaaccatgcataccaaaatccacagatgctcaaatctcttatataaaatggcacagtttacatataacctatgcacatcctcccatatacttcatttttaaaatttatttttatctttttgagttggaattttgctcattgcccaggctggagtgcaatggtgcgatctcggctcactgcaatctccgcctcttaggttcaagtgattctcctgcctcagcctcccgagtagctgggattacaggtgcccgccaccacgcctggctagtttttgtatttttagtagagatggggtttcaccgtgttggtcaggctggtctcaaactcctgacctcaggttatccacccatcggggcctcccaaagtgttgggattacagacatgagccaccctgcccggccttcccatatacttcaaatcatctctagatgacttacacccaatagaacgtaaatactatgtaaatagttatactgtattattttaaaatttgtattatttttattgttttctttccccacaaatattttcaatctgcagttggttgaatctgcagatgcaaaacccacagatctggaaggccacctgtatattaaaaggtgtatataacgacattacttacctcatacggttatgaggattaaatgaaagaacttacatggtgccttagcacaatgcctagtgcctagtaagctgtgaatcactaccactcgtattctcactattgcctgggaactggaccgggcattgggcctgttgaaagttcctctgccgcttacctcgtccctctcttgggccctggaaatagcccatcagtggggtagttgcttcctggaatgtttcctcacacagcagttcccagctggaacaatttatttttccaagaaatgggacctctaagttataagagtcatgggctgggcatggtggctcacgcctgtaatcccatcactttgggaggctgaggctggtggatcacctgaggtcaggagttggagaccagcctggccaacatggtaaaatcccgtctctactaaaaatacaaaaactagccgggtgtggtggtgggcacctgtaatcccagcttctcagctgcttgggaggctgaggcaggagaattggctgaactcaggaggcagaggttgtagtgaggagagaggcatgccactgcatgccatccagcctgagcgacacagcaagagtcccttgcaaaaaaaagaatcatagaacttcaaagataccctttcagagcacattcttcacggttactgttggcagaggtcacaggtgtgggatggagcatggctccgtcttgagaagtctcatccatgagctcagggaaagaatgaagatcaacgtctgcctcaggcacaggatagtggagtggagcagggaaaccctgtggctacagtacctggcctaggatcttctaacgtggttttccacgggaagggacctgagatagggatctttagcaccctcctcataacgtttttttttttttttctcatttttcaacacatcagaaaacaaacaggacagagttccttggcctcattctttggttctggttgactgaaaggcagtgagcttgcaggatttggcagcccagggcatcaactcgatcaagggggaagggattcagaattacttgtgacatgcaggacctgctttttaaacaagaacacacattctcataagtctgttttcttccgacatagcggtcagtgttgtaagctctagggacttgggtttttccagtcagctgtgctaattccagacaggagtacagccactcttttttttcctcttcttttgtttccctcctcttttttgagacaaggtcttgctctgttgcccaggctggagtgtagtggagtgatcacggctcactgcagccttgacctcctgggctcaggtgatcctcccacctcagcctcccaagtagctgggactacaggcttgagccactatacccagctaatttttgtatttttttggtagagccatgttgcccatgttggtcttgaactcctgggctcaagtgattcacccaccttagcctcccaaaatgctacggttgtatgagtgagccaccaggcccagcctttgtagccattctttctaaatatgtctttccactatagcagcaaacgcctccatcatcccttcagtgaacaaatacccactcccatgttcccactataaaggagagacaagtttaatttcaggaggctccggggccacctgaaaacgatgactggaacctttacaggattaatcttccatcaatctttcatttcttggacatcaattgaattgaaggtgggctacaataggaaagttcctttgaactttataactgcccaaaatctcctcctgaatccagaaccttttcatcctgaagagtttttctgactgtggagggaggtcctgtggaatttattccagaggtgaatactcagctcactttctcatccttactctgactgaatgtgaagcaactgttagcctggaccaaaagagactcatacaaccaagcagcaaaccactaagatttcccaaactccattagtcaaatgaacacaaatctagttgtagtgtgagaaccactgaagcccagccaatctctgggcgcaatcttgtgtgcctttggtcagcaaagtggtaggatgcccaagagcttcttgaaacgactggtgataattggagggaaatcatgaccaaaatctcaaaacaaggaaggatgagatttttctgctccctaggagctgtttgtggagagcagggaaggagagttccttccattccaaaggaataaaagacagctccaagtctgtgagccaagaaaaagggaagctctgtaagcagtaattaacctttctctaactggctgaatacccagctggtaccaaaagttaaaaaattgctgcccaacactccatgatatggagcatcttgggagtcaggtatagttaatgcaaactttatttataaaagactcttaaattagttgtatcatgccatgcattcatacagaatacagtgacccttcagggcgacagagaagagctcacaaactgaaaggaaaactattaaagagtttctaatattaactattaaaaagctaggaaagattaggacaattttacaaatgagcaattaaaaagaaaagaaaaggatctgggaactagactgagcagagagggggcagctgtttacaagtctgtacactaaactcatccacggacagtcttctagagcagcaggacgctgacagagagaagcagagtatgtacaaatacttgtgccacaatgactcctccccctagctccacggcatgatacatacaaccagtttgtatacactaggcctgctgaggccattttaaactatgaggacttctagtttagtaaactaaagctgcagggtgccgggggagtggggcagcttcatttgcgactgctctttattctctccagtctttttttcaagtcgtctatgttagctgtggaggaggaggaggtcacagttcctgaagagtgagtctggttagaatccaggtctgaatgctggtgctgctcccgtgactcccggagctgagagagtttgctgtggagcatgtctgtggaagaggcgacagtaggaactgctggtttggagagcaaagaggtcaaaggaggtcggtcatcttgctattgagagaaggagagagattgtctaaggtcaggtcaagcaggtcaagatgcagctccagaactacagcaagactaagccacttctctgtgggccagcctgcctcggacctgcttgtgactaccctccctgaactgcacagaagaaaaggagcagtacctttgtgttgtccagaccacatcgctgtcggaggatctttagcctttccaagtagacagatggccccacttcttccccatttgtgttacctatggaggacactgtgcttgtgggcgtgggcacacatgtgacttccatctgaggggagatgcctagaggggaaaaagtagaaagaatattcagatatccacatatcccccttctaaagtgccttggttaatctcccaccaaaaagaacaattaagaatttcctatacttgaaaacgacaaattccacaagaatctacctggagttggtgataagggtgctctgaaatatacaatataagcttcttgagaatgcaaaaaactgatatagaaaggcagaatgtaaattgggtcatccatctgcatcctgggttatgcaggggattgtactccagtaatcccagggctgacttgggcaatccaaaaagctgaagctactcctaagcatactgtaattgcccaactgaaaaacccgaggaccttaaatgtttggaagaattagattaagtttggaccaatgtcacataggagaaactcatttgaacctgtgaaggaagcaaggtgtccaaggctatggtgtattcatggggaagagaaggtgtccaacaattatctaaagagggcatagaactggagtgtctgtaaccctaccactaagatcaatattctggcaggagagaggaaaaccaaaacaacaaaaaatccatcacacttcctaaatttctgagaatgaacaatgatacaatgcgggcctttaaaatatttcacttggtatcaatgcaaatgcattccacaggccccaaaggtaaggtactgggaggaaacactgccttatggtaaatagaaaagtagaaaggttactccagggaaaaaggactcctttaatgtaaagatgaggagaatcctctgagggggtgaaaaatgaatgaagaattatgtaaaagccagcaatatgagatgtctgaatactctaaggcacaaaatcaatttaataatcagtgggaatacatgcttgggttgcaaatgtgctgtttaggccaaaattatcacacgttgaacatccccaaaaagggctttggaaacaaggataggatgcctgccctgatcaaaccatggtatgtttacatgtggcatactgttggacattctgcacaccacactttaactcctaagaggtctttttcattaaagaccagcctgggcaacaaaaagagaccctggctgggcacagtggctcatgcctgtaatccaagcactttgggagaccaagacaggtggatcacttagaggtcaggggttcaagaccaacctggccaacatggtgaaaccctcttaaaaaaaattcaaaaattagctgggggtggtggcacacacctataatcccagctactcgggaggccaagacatgagaatcacttgaacccaggaggcagaagctgcagtgagccgagatcgcaccactgtactccagcctgggtgacagagtgagaacctatctcaaaaaaacctcaaaaaataaaaacacttgtaaagtcttggaaaggcgtaatttaaggtgtcaaaaacaaaaaagaactcctatttaagagaacaaaatttaactgaagcttcagcccagcaagatacaggctgagagtggatatgatcagggtctgaaaaacacaaagggacatgctttgacaggcaaacacattctcaaatgtaagagtaggtgaatgtcactaaactcggaaagaactaagcatagaactgatgagagggcacttttgcagttgggtctgtcttgtcttggtttaaggctcatgatagctattttctataactgaaacctcctaagtcttctgtttgtctctagatcctgtgagcagtaattctcgaatagggactttttcactgtgggggcagtaacatttcagcttaaacttagttactgcattcatttatatcatttaacaaatatcatcatgtgtggcttaagggcagggatacattctgagaaatgcatttgttagataatttcattgttatgtgaacacctagttggtataacctgccacacacctaggctacaagcctgtacagcatgttactgtactgaatactataggcaatgttaacacaaagtatttatgtatctaaacatagagaaggtacagtaagaatgttgtataaaagataaatggtacacctgtataggacatttaccaggaatggagcttgcaggactggaagttgctctgggtgagtggtgtgtgaaggtgaaagcctaggacactactgtcaactttataaacactgtacacttaggctacactaaacttatacaaaaataattgtgctatgacattatgacagctatggtatcatcaggtgatagcaatttttcagctccagctgggtatggtggctcacacctgtaatcctaggtctttgggaggctgaggtggggggatcacttgagaccaggaagaccaggagttcaagaccagctggggcaacatggtgaaaccctgtctctactaaaaatacacacaaaaaattagctgggtgtggtggcacgcaactgtccagctactcgggaggccaaggcaaaagaatcacttgaacctaggaggtggaggttgcagtgagccgagatcgtcactgcattccagcctggatgacagagtgagaccctgtctcaaaataaataatcttatgggaccaccatcatatatgcagtccatcactgggcaaaatgttgatatgcatgactagacacagatgctgaacaattaacctaataaatactacattatatagtatgttagaggtgtaagtgctatggtggggtgagggataggttgcaagttttaaacaataaggttttactggccaggcacagtggctcatgcctgggagtactttgggaggccaaggcaggtggatcaactgaggtcaggagttggagaccagcctggccaatacggtgaaaccccgcctctactaaaactacaaaacttagctgggcgtggaggtgcacgtctataatcccagctactcgggaagctgaggcaagagaatctcttaagcctgggaggcggagggtgcagtgagccaagatcgtgccatagcactccagcctgggcgagagagcaagacttcatctcaaaaaaaaaaaaaaaaaggtttcactaagatggtggtatttgaacaaagatgtgaaagaggaaagggagctaggcaacaaagccatctaaggaagagcatttatgtgtaagaaatagccagtgcaaaggccctaagaagacatatgcctggtgtgttccagaaacaaccagggggaggccaggcgtggtggctcacacctgaaatcccagaactttgggaggccgatgtgggtggatcacttgagcccaggagttagagaccagcctgggcaacaaggagaaaccctgtctctacaaaaaatacaaaaattagccaggcatggtggcatgcacctgtagtcccagctactcgggaggctgaggcaggaggactgcttgaacccagtgagccatgattgcgccactgcactccagcctgagtgagagagcgagaccctgactctaaaagaaacaagggggctggtggggctggagtgaaacaacaggaagaggactaggtgatgaggtactaggggcactggcgggtcctataaacacaggacctcagagacctttaaagggccttttgcttttgctgagtgaaagggagagcctctggaaaatgtttcattagagtcattctgatgctatgtgtagaaaagaacagaggaaggcagggtggaagcagggagatcaagcaggaagatagtacagtaatacagatgagagagaacacacacaccaaggtggtagcagtgaagagaagtgtggatgaattctgcatatggtttgcaggtagagccaaaataatttcctgacggaaaggaagagaagactcaaaagctttggatctgaacaaactcgaaggataaagttgccatcaaccaagatggagaagaatgtaaatggatcggctgggcatggtggctcacgcctgtaatcccggaactttgggaggccgaagtgggcggatcacgaggtcaggagatcaagaccagcctggccaacatggtgaaaccccgtctctactaaaaatacaaaaattagccatggtagcaggcatctgtaatcccagctactcgggaggctgaggcaggagaattgcttaaacccgggaggtggaggttgcagtgagccaagatcgcaccactgcactccagcccgagcaacagagcgagactgtctcaaaacaaaacaaaacaaaacaaaagtcaatggatcaggcttacgggatgatcaggactttagtttttttgtttgtttgtttttgagatggagtctcgctctgtcgcccaggctggagtgcagtgatgcgatctcggcccagtgcaacctccgcctcctgggttcaagtgattcttctatctcagcctcttgagtagctgggactacaggcgcacgccaccacacccaactaatttttgtatttttagtagagacggggtttcaccatattggccaggctagtcttgaactcctgacctcgtgatctgcccgcctcagcctcccaaagtcctggattacaggcgtgagccaccatgcctggccaggactttagtttttgacatgtagagtttacaatgtctatgtgaggctgggcatggtgactcaagcctgtaatcccagcactttgggaggccaaggtgggtggatcacctgaggtcaggagttcaagaccagcctggccaacatggagaaaccccatctccattaaaaatacaaacattagctgggtgtggtggcacccgcctgtggttccagctactcaagaggctgaggcaggagaatcacttgaacctgggaggcggaggttgcagtgagctgagattacaccactgcaccccagcctgggtgacagggtgagactccgtctcaagaaaaaaaaaaaaaaaaaaaaaatctatttgaaacccaggtggagatatc

SEQ ID NO: 344 - DNA, 36308 bp, Homo sapiens
tgtctcaaaaacaaaaaacaaaaaaaaaagaaaaaacaggcacccaaagaaatgaagtaacttaatcaggatcataagtgacaagagccagcattcaatccagtcggacgctgcccaagcccttcctcctaatcacaacaactaccttctagaggcaggagacatttctaattggtggagggatgaggcaactctgaagtctgaaggaaaacagcatccgtgagagaaccaagatgcagaaccagttggtggaatccacagatctggccctgctgggtcacaggttctcaccctagtttccctccctgcctaaatcttgctgaggcttgtccttgatgctaactacatgtagctttcacacgcaggattgagagcatgcactggtctcaattcctcctttgacatccatgcctggttttcgtaggtgcatctgtctcacgtacctggagtcattgtgttaaactctaagatcctgggcttttaggaagtggctctgatctttgtctctctcaccctgatgttttatgaggatgatggcctaacagggtcctgccaggttgcagagggaagacctttaaacaagatgacttgtttaaatactatatggttggccgggcgcagtggctcacgcctgtaatcccagcactttgggagggcgggtggatcacttgaggtcaggagttcaagaccagcctggccaacatggtgaaactctgtctctactaaaaatacaaagcccctgtggtcccagctagttgggaggctgaggcacaagaattgcttgaacctgggaggtggaggttgcagtgagctgagatcacaccactgtactccagcctgagcaacagagcaagaccctgtctcaaaaaaaataaaaaataaaaaaaacaatatggtatatttaagattggctattataatatgctcttcactgtggttagtaacagcaataataataatcacctgcatttgtgtcatgcttttatggtttccaaagaacttttatgcacattttctttttttaattttcattatatttttaattctgtaatagatactaagtctcagactatttcttcttcatttaatttagcaataacttaatcagactaggaagaaatatttcaagggataggtggatttgcttaataaaaaattatgtttattttaaaagctctcagtgattattatcaaaccgtacagtagtccgagactgcagaaacaaatgtatgcgtcacaatatgtttatctctgtgttaccaaaacaataaaaacatgaaataatctggatattttacaagagtaaattaaaatctattgagaagatgaaatattctgctgcaattgaaaatggtgctatggaagaataagcatttggggaaatgttcactttgttgttgagtggggaaaaccaagtcacaaaaaaggaatgcaaatatcaatctgattttttattatttgtttatgttgggataaagtctcgctctgttgcccaggctggagtaaagtggtgtgatcacagctcactacagccttgagctcctgggctcaagtgatcttcccacctcagcctcttgagtagctgggattacaggcgcgtgccgccactccggctaagttttgtatttttagtagagacaaggtttcatcgtgttggtcaggctggccttgaactcctaacctggtgatacgccagcctcggcctcccaaagtgctaggattacaggcgtgagccaccacgcccggcccatttattcttaactctacctgcatgtcactgaggttggtggttggaaggatgacctttctatgacaagaaaaggaatcaatcaggtagaagttgtgttgcaggacttatctttagttcagctaaagacaggttctttgttccatggccatgaaaatccgggctcgcagacaatttgaatagtcagtaagatggggttttattgggtgaaaaggaagaaaagggggaaacagggattctcgcaaggccagagtccctgctacagagcttcccgcctagccctttgaatcccagtttccacacaggaagaggaagggccatgctcctccctgctgcaaacttctcgaagcttcatctcattgggcaggctggttggagtttcttccacctggctgtctcagttgtaggtggaagaaatagaaaggggaaaatggggagagtaggagggtgcaatcctaccactacagctacttatgtgggcatctcagcccctgcagatcaacctttcccatctctttaattagcatgtggcataatgactactctccacacctcagcccatcatgtacttatttcattaagtaatcgctagcacatatgctgtcgcctgactcttcatgaggggcgaggtgccagttctgcaccctagagcagtatcatttttcagaaggtgagattgctattgtggctgcatttcccatgatgtcatgactaactctctgtctacacatgtcccagtgacacatcacccagccacaattccagccccagtttgaaagtcttcataactcttttccttaaaaatatttctcgcctctccctctccccctccccctccccctctccctctccccacggtctccctctccctctctttccagggtctccctctgatgcccagccgaagctggactgtactgctgccatctcggctcactgcaacctccccgcctgattctcctgcctcagcctgcagagtgcctgccattgcaggcacgcgccgccacgcctgactggttttcgtatttttttggtggagatggggtttcgctgtgttggccgggctagtctccagctcctaaccgcgagtgatccgccagcctcggcctccggaggtgccgggattgcagacggtgtctggttcaatcagtgctcaatggtgcccaggctggaatgcagtggcgtgatctcggctcgctacaacctccacctcccagccacctgccttggcctcccaaagtgccgagagtgcagcctctgcccggccgccaccccgtctgggaagtgaggagcgtctctgcctggccgcctatcgtctgggacgtgaggagcccctctgcgtggctgcccagtctggaaagtgaggagcgtctctgcccggtcgccatcccatctaggaagtgaggagcgcctcttcccggccgccatcccatctaggaagtgaggagcatctctgcctggccgcccttcttctgagatgtggggagcgcctttgccccaccgccctgtctgggatgtgaggagcgcctctgccaggccgcgaccccgtctgggaggtgaggagcgtctctgcccagccgccccgtctgagaagggaggagaccctccgcccggcaaccgccccgtctcagaagtgaggagcccttccacccggcagtcaccccgtctgggacgtgaggagcgtctccgccaggcagccaccccgtccgggagggaggtgggggtcagcccccaccaggccagccgccccgtccgggagggaggtggggggggatcagccccctgcccggccagccgccccgtccgggaggaaggtgggggggccagccccccgcccggctagccgccccgtctgggaggtgaggggcgcctctgctcagccgcccctactgggaagtgaggaacccctctacccggccagccgctccgtccgggagggaggtgggggggtcagaccggccagccgccccgtccgggagggaggtgggggggtcagccccccgcccggccagccgcctcgtccgggaggtgaggggcgcctctgcccggccacccctactgggaagtgaggagcccctctgcccggccagccgccccgtccgggagggaggtgggggggtcagccccccgcctggccagccgccacgtccgggagggagttaggggggtcagccccctgcccagccagccccctcgtcccggggggtgaggggcgcctctgccgggccgcccctactgggaagtgaggagcccctctgcccggccagccgccccgtccgggagggaggtggggggggtcagccccccgcccggccagctgcctcgtccgggaggtgaggggcgcctctgcccggccgcccctactgggaagtgaggagcccctctgcccggccaccaccccgtctgggaggtgtacccaacagctcattgagaaccggccatgatgacaatggcggttttgtggaatagaaaggggggaaatgtggggaaaagattgagaaatcggatggttgccgtgtctgtgtggaaagaagtagacatgggagacttttcattttgttctgtactaagaaaaattcttctgccttgggatcctgttgatctgtgaccttacctccaaccctgtgctctctgaaacaggtgctgtgtccactcagggttaaatggattaagggtggtgcaagatgtgctttgttaaacagatgcttgaaggcagcatgctcgttaagagtcatcaccactccctaatctcaagtacccggggacacaaacactgaggaaggccgcagggtcctctgcctaggaaatccagagacctttgttcacttgtttatctgctgaccttccctccactattgtcctatgaccctgccaaatccccctctgtgagaaacacccaagaatgatcaataaaaaaaaataataataattaaaaaaaatatttctcacctgggcgtggtggctcacgcctgtaatcctagtactttgggaggctgaggtaggcagatcatgaggtcaggagttcgagaccagactggccaacatggtgaaacgccgtctcttccaaaaatacaaaaattagcagggcgtggtggcacacgcctgtagtcccagctattcaggcagacagctgaggcaatagaatagcttgaaccgggaggtggaggttgcagtgagccgagattgtgccactgcactccagcccgggtgacagagcgagactctgtctcaaaaaataaaaataataaataaataaaattcccattttttgatcaaatgaaaaaaaaaatctacaaagtagaaaaccccaaaaaccataacactagataatagttgaccactaatgcctgaaatgattatcatgagcgattatttctttgggtctagaaggcctttgtgtagatgagcgaccactatgaccaattcactccttgcctaccatccagacaccttagcctcactgccaacaagctaagagatgctggctgagtaagggcctactctggcttataaggacccctgcagctccagtgatttataattctaagtaaactaacactttaaagagatgagtcaagagctgcttgatggaaaatcactccaggcaaaggatactgagtgcaaaggaatgacgggggcatacatggctggagcaggatgatgatatgaatcacaggcgataacatcaaggaggtggtgtgtgtgtgtggatggggaagaggggacaggatgtgtaaacctttgatagattttggttttcactcagagggaagtggaaagcactttagtatttttgttttcttttcctttttttgttcttggagcaaaaaatggagtgttgctcttgttgcccaggctggagtgcaatggtgccatctcggctcaccacaacctccgcctcccaggttcaagtgattgaacagcctcccgagtagctgggattccaggtgcccgacaccacacatggctaaattcttttgtatttttagtagagacagggtttggccatgttggccaggctggtctcaaactcctgatctcaggtgatctgcctgcctcggcctcccaaagtgctaggattacaggcatgagccactgtacccagcctaattttcattttataattttttttttttttgagacagagtcttgctctgttgcccaggctggagtgcagtggcacaatctctggtcactgcaacctccgcctccaggactcaagcgattgtcctgcctcagcctccggagtagctgggattataagcctgtgccaccacgtctggctaatttttagtagagatggggtttcaccatgttggccaggctggtctcgaactcctgacctcaagtgatctgcctgccttggcttcccaaagtgctgggattacaggtgtgagccagtgtgcctggccaaataattttaattttttagagacagggtctcacttggttgctcaggctagagtgcagtggcacaatcacagctcactgcagcctggagctcctgggcttaagtgatccctctgcccagccacctgcatagctgggactataggtgcatacaaccacccctgggcaatttttttgtagaaatagggtctcaatatattgcccaggctgatctcaaactcctaggctcaaccaatccttctgccttggcctcccaaatttctgggattataagcatgagccactgcacctagcctgactccaagacttgatttgagcaattggaaggatggagttgtaatttaaggagagggggaagactgtgaaaagggcagtggaggtgtaatgaatcaggaagttagttttggacttatgcttgatatgcctgtagaaacatccaaggggggattttgaatagctagatgaatatgctatatgtctggattggggaaatcaggagtagaaatagaaatttgggagctgtcaacatatagatcgtatttaaaaccatgggagtgaatgaggtcaccaaaggaatgagtgtatactttgagaagaaaagaagtctgctgggcgcagtggctcatgcctgtaatcccaacagtttgggaatccaaggtgggaggattgcttgagcccaggtgttcaagaccagcctgggcaacatagtgagaacctgtctctacaagaaataaaaaagtattagccaggcctggtggtgtgtgcctgtagtcccagctactcagggcctgaggtgagaggattgcttaagcctgggaggttgaggctgcagtgagccatgatcgtgccactgcactccagcctgggcagcagagtaaaatcctgtctcaaaaaaaaaaaaaagaaaagaagtccaaagactaagctaggggcactcactccagaatatagtggtcaggagggtaggtgggaactagcaaagaacccacttctgagttgctaatgcgacagatggagaatcaagagaagagtgggcctggaagccaagtgaatagagcattccagaaagagggagaaatcaatcgtgtccaattctacagctaggctgagtaactgagaaaggactgaaagaggaccataggacttaccatgtggatttcattactaaccttgtccagagtgagtgctcaatgaatcagtgaataaatgagtgtaactttctccaactatatttgattaggacccagtaacttgggactttgtttctccaggaagagtttgacaaattatttgaatgaaataccttttccctcaatgtctaaactcctctttggaattgtaggtggtggaagattgcagaaggttcctaatctctggaagccaggcagtctagttgcctgtggtcatttctttgtactgttccacacagccatacaatactccaatcccttcagggcgaaggagtcatcaacacctgaaaaacaaatactatactcccaaaattacagaaaaacacctgcaaactgactcaagtgagtttagttcatttagtcaggctgggggaagaaaccacatttttgagataattaactcatagcattgttcaataaagtcttttattggaaattgtgatgattcaaggcatattcccataaaatacagtgaaaatttaaatcgaaagcagctggaccctgatgtattgttctctgaaagaggaagattccaccttaaaggcagtcattctatagcagttcccatttcttaggtgcttactatataccagaaacggtactaagaagtgctttatggacatttagcaaagtgaatcctcacaaccaccctacgagagaggtactagtatcattcccagatgatagatgtaatattaataagctacagatgaggaaatggatgcttgaaaagtttgaagggacatcttaggaatcagttatctcccctggggagggaccttcaggaatggcctgatccctatcaggagagctgtccgctgttcaggatgtcaaaggttcctgttctgcttctagaagtcagcttttcctgggaggaaaagtgggcatgggctgaggtgagagctggggtgcaggtggagtatgaagactcctcagagaaaggaaataaacaaaaaatatttattgagcttctaccatgtatcaaacccagtcactagtcactattttatcctcagacagacacctataaacctttaaaccacgtgtgtgtgtatatatatatatattataagaaagcttagagaggataagtaaacttgggatcacacagatgtcaacaaggggagaagcctgtccgggtgtggtggctcattcctgtaatcccagcactttgggaggctgagtggggaggatcacatgaagccaggagttccagaccagactggacaagatagggagaccccacttctattttctaatagaaattaaaataaaaaataaagaaaatttctttatacattgagctgaaattaaaccccactgtggcttccaccaatttttgctctctggagcaactcaaaacacatctaaatcctcttctacaagcgaatcctttaaatatttgaaaatacctatgtctctcttctgtgctcttctggtaccaatagtttaaatgggtaacagtagactttgttttattcaatcttttaaaaagcaaataaaaagtaagacatgctgggtgcggtggctcacgcctgtaatcgcagcactttgggaggcggaggtgggctgatcacgaggtcaggagttcgagactagccagaccaacatggtgaaaccccgcctctactaaaaatacaaaaattagccagatgtggtgcacgcctgtaactccagctactcgggaggctgcggccagagaattgcttgaacccaggagacaaagtttgcagtgagccgagatcacgccactgcactccagcctgggagacagagcgagactccgtctcaaaaacaaaaagtaagacattaccaatatgatgccaaccctcatgcactcatccccaaccccacacttctcttctcccaccccttctatctgcttttgtatttatttagcctatgggatcccaatgcagaggagccctggtggacgcatttatagtgcagcgatgaatagaagacagtgatagtcttatactggagttgaaatgtgataaacatttatacactgtgtttataagtcgtgtaactctggccaatttatctggtctttctaagctcactttcctcgtctgtaaaatgggaagaataatcatacttattgcgctggttgttatggggattaagcaagataattctctaaagctttggcacttggcgctgaaagtagccattccatgtcttctttcccgccccgcctcttgtgctccccaccgctttcgtgatgtccgcagttgcccacctgcctctacaataaaaaacgcatccctcctcctgcagggtccaccgcaccgggaagccctgtctgtatcagttaccaaccacaattgcagtgagtacgaatcgtggctttcccacagtcaggaaaggcaagggagaccgacgacccgcttctctaggagtaagtaaagattaaaggtagttcgcggtatagcctaggcagggattaacccgtggtcccagcgctcctgctatttgcattccaaagcagacacctcatgcgctcaaccccgcccgcaggcggctcccgcagtctaagggacctggcgcgagtccgggaagcggagggcgcagctgcgcagggaagggggccgggggcgggaccagggcgcgcgttccggtcccggggcgtggcctcccgcaggtgagtacgctgctccttcggtttccctgaaacctaacccgccctggggaggcgcgcagcagaggctccgattcggggcaggtgagaggctgactttctctcggtgcgtccagtggagctctgagtttcgaatcggcggcggcggattccccgcgcgcccggcgtcggggcttccaggaggatgcggagccccagcgcggcgtggctgctgggggccgccatcctgctagcagcctctctctcctgcagtggcaccatccaaggtgagaaacctggccaaggagggctcttatctctgaggagctggggtcctgggcacgctgggcagacggtgggatccgggcaggtgtgcgaaggctgttctgctgccggcacccatctctacgaatcccttagcctccccttggtggctttgatgtgaggtctctgcgccaaggaggcacccaggtgggacatgcgggagcagctgaagtcagcggagccgggcagaggcagagatttccccaaagaccccacttcccgtagaggctgtcatgctgggcacctccaggccccagcgtgggttcggggaaagggagggaaggaaggagtagctgtgtctaaagggtacgcagaggacctagtcccctccccgggcttggttgctttgtaaacactaagtcattaagagctttttgccaactccggagacttcctccgctggccccgcggggccggtggggttagcgagctgattgcgcagggcagggcggagtgggtgggaacccgcggcccgggagccttctaggttgttttttgcgtccctctccaactgctggaagcctttcttcgggttctggcccctgcgttcgagacccacccgggtcccgctgctcctggcacccacagtggaaggcccggggtatgaaagtcagggccggtccctgatgggttctggtggtaatgagcgctcaggcccgttgggcgccacgaggatttacgagcggaactttttggaccctgccttatatttgaccagttgaccctctgggcctggggttccgggactttcctagtgtgccacccggagcggccactggctgccacccaggtctgcaggccagaggctggctggcctgggaacagagcagcacttgcgcccggccgtcgcgttccttggatgtgctgctccgggtgtgctcgaacttgtattgctgggagtgtgttcttccgggcccagcaggcctcgctgtggccgtgggggatgtttgacctgcgatcgcgccactgtgatcctaaccgaggcccctctgtttggggcagcctgggtagcaaagggagcttttaatttccctcagaaatgcgcatttctcacttttatcctcctcttcataaagacgaagtaaaagagcaagtcacagtgggttggaattagatggaagaatgtgattcttttccctctgcagttagggaaaagggtgttaatggtgtaagcttgaaaactgtgcaccgctggtatatttttttttcttaatcagcatcagaataaaggcatttagttccaggaagtattgaaaactgtaatggacacctctcctctatgtcctttaaagttggaaacttaaaattcaggagcaaaggttagtatgtgcaaactttaaaaaaatacatgttggtatagctgattcaacatctttatgattcagagatccctgtaggaagcatgccccgattatttgtcttgttcttgtttactactcttgggggattgggagatccctggattataaggcgaacttgatttaacaataaggaaaaatcaggttacttgttaactatagccacttaatattgcaccttgttcctcatcctccccccaccatacttttattcccttgcaaagtaactttcccaaagggttagtgaagtaacactgacaattgatttaggcagatggagctttcctcccaccttaaaactaaattgattttaataagaaatacagtgttagcaaagcttttctgccctcagggtgggtctttgctcactcgctttttagccggtccttctgcgtgcccctcaggtggctgcagggccgatttggggtttgattttcttcccaaagcctcactccaaaagactgcctcatagaaacgaactcagccgagatcacaaccttctcagggtacaggtgaaggacactgaattgaggaggcaaggcaaggaaaacacttggaaatcagggcttctctttccctttacaatagtaattgataattatttgggtaaacatgcttaatatgtgtcctcactgcatcgttaactcctggaggcagggggccctaccatcctttccatcacgtctagcatagtctcatcacctacgggacctcagtaaatagcaaatgaatgaagtgaggagtcttgcccagagtaccctggctggtccatgtggtgttcatttcagtcagcttctctctgccacttacttatttttttccaccatgttacaggcctaggtcattccatttatcttttggagactggaacttctgttttctttataattggtttggtggtttttttttgtttttttggttttttgggttttttttttttttgactctcattcggttgcccaggcttgagtgcagtggtgcaattttggctcattgcaacctccacctctcccgggctcaaggaagtctcctgctgcagcctcccgagtagctgggacgacaggcacgcaccaccacccccagctaatttttgtatttttagtagagacagggtttcaccatattggtcaggctgatctcaaactcctgacctcaggtgatccacccaccttcagcctcccaaagtgctgggattacaggcatgagctactgcgccctacctataattgttttttaaattataaaaacaatatgtgatcactcgagggaaaaatgagccaaaacaaaaaaaggaaacatttaattaaatcaccctgaacttcagtaccaaagtagccaccgctaatatttcggcttatatattttcccactctttattacatccatgcacaaaatatgtattcacaaatacagaaaatatgtttgtgcaagtatgggattatataagcacatcagtatcatgtcaatacatataaaacatttttaatgactccaaaatgttacagaaggatgcatcaattttaaaattagtcctttgttgatagacatgtggtatttccattttttttttccccctgagatagaatctcactctgttgcccaggctgtagtgcagtggcacgatctcggctcactgcaacctctgcctcccaggtttaagtgattctcatgcctcagcctctggagtagctgggactacaggcgcacaccaccacatccaactaatttttgtgtttttggtataaacggggtttcgccacgttggccaggctgatcttgaactcctgacctcaagtgatccacctgcctcagcctcccaaagtgctgggattataggcatgagccaccgtgcctggccaaagttttgtaatatgacagaacactgcaatgaactggaagataggactttaaatttgatccttttgcttgctttgtagttactaaataaccttgatagatgatgttttagtaaatctgtatttgactttcttatggttttattagcttggcaagtgttgaagaaaacagttcattctgaaagaacacttctgaaaatgtactaaaagtttagctagggaggggcaccccacaattgaaacctttatttttcagtctgtgctcccaaagattgggagcaaaaaaggacatttggggtgaggggatcatagagaagagagggtgaaaggaagagaactaatgcaagtaaagtgcttgttttacacttggtttgatggggaggttgggccacaagaggagtatacttaaaataaaaattaaattaaaagttttaggccaagcgtggtggctcacgcctgtaatcccagcactttggaagtcaaggcgggtggatcacaaggtcaggagatcaagaccatcctggctaacatggtgaaaccctgtctctactaaaaatacaaaaaattagccgggcatggtggcgggcgcctgtagtcccagctgcttgggaggctgaggcaggagaatggcgtgaacccgggaggtcgagcttgcagtgagccgagatcgtgcctctgcactccagccggggcaacagagtgagactcagtctcaaaaaaaaaaaaaagttttacacgcagattttcccaaaattgtgtaaatcagaagggtctaaaaaaaagtgaaaatctctcattctttctggtctccaatctcagcacaacttctcgggttttgtttgtttggttggttggttttttttttttttttttgagatggagtctcgctgtgtcgcccaggctggagggctggagtgcagtgatgtgatctcagctcactgcaacctgcgctttccaggttgaagtgattctcctgcctcagcctctcaagtagatgggattacagatgcgcgccaacacctccagctaatttttgcatttttagtaaagccagaattttgccatgttggccaggctggtcttgaattcctgacctcaagtgatccgcccgccttggcctcccaaagtgctgggattataggtgtgagtcactattcctggccatcagctcaacttctctatgcacaaatgatttataggaatagaaggagcataccgtactgtacatactgtgctatgatttatttatcttttttacctaatcgattcatagtcagtttatagaaatctgtacaaactttttttttttttttttgagacggagtcttgccgtgtcgcccaggctggagtgaaggggcgctatctcagctcgctgtaagctctgcctcccgggttcatgccattctcctgccacagcctcccaagcagctgggactacagacgcccgccaccatgcccggctaattttttgtatttttagtagagacagggtttaaccgtgttagccaggatggtctcggtctcctgacctcgtgacccacctgcctcggcctcccaaagtgctgggattacaggcgtgagccactgcgccgaccctgtacaaacttttataggggggtaattgaactagtcctccccaccacacccccccccccttttttttttaaagagactgggtctggctgtcacccaagctggagtgcagtggcaggatcatagctcacccccagctaattttttttttagacggagctcccaagtagctggggctatggctaggttgccactatgcctggcctgaactactcccctcttcccgcccatccccgaaccccagatgaagtcttgctctgtcacccaggctggagtgcagtggtgtgatctcagctcactgcaacctccgcctcccaggttcaagcctcccaggttcagcctcccaagtagctgggattacaggtgcccgccaccacacccagctaatttttgtatttttagtagagacggggtttcaccatgttggccacgctgatctcaaactcccgatctcatgatccgcccgccttagcctcccaaagtgctgggtttacaggcgtgagccaccctgccagggcctgaactactcccctttttgatagatgttgaaattaacattgttttaccatgctaaacaatgttccagtgaatattctagtacataaaatagctttgtgcactttagctggtaggtgcagggcaaattcctagaagtaaattgctaggtcatatggcaaatacatttaaaattttgatatgttttgccaaattacccaccaaaaatattatatcaatttatattcctttgagatacaaaattcaaataatatagagaggtgtaaaataaaaagaaaagttctcttgtccccagctattctactccacagagccagccactttttattgtttggtggatatccttctagacttcagattttgcaaattgtacattataatttttttttttttttttttttgagacagagtctcactctgttgccaggctgaagtgcagtggcatgatctcggctcactgcaacctctgccttctgggttcaagcgattctcctgcctcagcctctggagtagctgggactacaggcgcgtgcactacacttagctaatttttgtattttttagtagagattgggtttcaccatgttggtcaggatggtctcgatctcttgatctcaggatccacccgcctcggcctcccaaagtgctgggattacaggtgtgagccaccatgcctggccagtttcttttttcaattgactgtatattgtggctgtctttccatttcaatattattggctactatattgtctacccttagtagtagggactacgtcagggacatgctaagttaggaatagaaataaggagctgtttgtctgtaactgagtggggggatgctgccttgagcatctgtgagtgtgtattttcacacacttgggcaataattgtttattacagccctagaaatgggaatgtaattgtagccaggcactttatttgtgtttaaacttcatttgtgcatttagtctctcctcaactctgtgaaatagaaatgattttacctggttgacaattgggagctgggatagcatcggttctctagacaagctctgtgagttttggtgagtggtaaggaccctgtacagagtcagagcaaatgcactgggcaagggcttcagggaccttcgagtagcatcttgacatttaccagtgttatagaacagttaatatcaacaatagttttgatggagaccattaaaggttatgtgttgaaatattctaagaaaaagttcctttttaaaaaaaaattgttatattgccattccttgctccttttttggtctttattttagcattcttatttaaaacagattttgagcactctttatgtgagctttcctgacttggtacatgcttatttttatggagaattttaatcttatagaaatatactattatagtgaattaagtgtatccaccactcaacttcaataattattaactgttggctaatcttgtttcatctattcccaaactcacctcccactcctcttccctgttatttcttttctgtttttttccctttcctatgatgccaagcctgtgttttttttttaacagctttaccaagaattccatatcagataatttgcacaccatacaattcacccctttaaactgtacaatttagtggcttttaggatgttcatagaattattcaaccattaccacaattttagaacatttttattaccctggaagaaacagtttagctgtcattcaccaatcttctggtcttagcccttggcaaacactaatctactttctatttatggatttgcctattgtagacatttgatagaaatgggataatgtgttgtcctctgtgactggcttctttcacttagcataatcttttggagattcatccatgtatctatgtatcagtacttttttttttttttgagacagagtcttgctctgtcacccaggctggagtgcagtggtgcaatctctgcaacctttgcctctagtttcaagtgattctcctgcctcagcctcctgagtagttgggactgtgggcccacaccaccacctctggctaatttttgtatttttagtagagactgggtttcaccatgttggccaggctggtcttgagctcctgacctcaggtgatctgcctgcctcagcctcccaagtacttgatttttgaaaacagccaaataatattccattgtatggatatactgctttttatttcttttcaattgttgatggacatttggattgtttccacttttttttcctttttttgagacagggtcctgctctgttgcccaggctggagtgcagtggtgtaatctctgacctcctaggttcaagctgtcctcctgcctcagccttcctagtagtgggactacaagtgtgcaccactatgcctggctaattttgtaaaatgtttgtagagatggggttctgctctgttgcccaggcttgtctcaaattcctggcctcaagcacttctcccatctcatcctcccaaagtgataggattacaggtgagcaccactgtgcccagcccacttgttgactgtgggctgggcacagtgctatattataatgctgctatggctgggcgtggtggctcacgcctgtaatcccagcactttgggaggccgaggtgggcggatcacaaggtcaggagatcgagaccatcctggctaacactgtgaaaccccatctctactaaaaatacaaaaaaaaaaaaaaaaaaaaaaaattagccaggcgtggtggcaggcgcctgtagtcccagctactggggaggctgaggcaggagaatggcatgaacccgggaggcggagcttgcggtgagccgagatcgcgccactgcactccagcctgggcgacagcgagactccgtctcaaaaaaaaaacaaaaacaaataatgctgctatgaacatttgtgtacaggtttttgtgtggactcctgcatacctgggagtggagctactgggtcatatagtaacttttttttttttttttttttttgagacggagtcatgctctgttgcccagagtgcaatggcacagtctaggctcactgcaacctccgcctcccaagttcaaatgattctcctgtctcagcttcccgagtagctgggactataggcgtgtgccaccacacccagctaatttttgtatttttaatagagatggggtttcaccatgttagccaggtgggctcaaaaccccgacctcgtgatctgcctgcctcagcctcccaaattgctgggattacaggcgtgagccactgcgtccagccatataggaactctttaaccatttgaggaactgccagataatttcccacaataactgtaccttttattttattttattttatttattttaaatagacatggtttcactctgtcgcccaggctggagtgcaatggcgtgatcttggctcattgcaacctgtgcctcccggttcaaatgattctcctgtctcaccctcccaagttgctgggattataggtgtatgccaccacacctgactaatttttgtatttttagtagagatggggtttcaccatgttggccaggctggtctcgaactcctgacctcaggtgatccacccacctcggcctccaatagtgctgggattagaggtgtgagctactctgcccagccgtgcaccagttcgtattcctaccagcagtgtctgagagtttcaattcctgtggttgtgaaataaatctcagatataatttcatcctaaagtattttagaatgtattaataaagtatgagggatttctttttcaaatataaacataatgccattatagtatctactaacattaatttttaatataatcaaatattcagtcagtattcaaatttctttcttttttttttttttttaatatagagacaggggcctcactctgtcacccagagtggagtgcagtggcacaatctcactgaatcattgaactcctggtctcaagtgatcttcctgtttcaactttccaagtatccaggactacaggtgtgcgccaccatgcctggctaattttttttttttttaattttttgtagagacacggtcttgctatgttggccaggctggtctcaaactcttggcctcgagcaatccttccacgtcagcctcgcaaagcactgggattataggcatgaacaaccgtgcctggctttgtgttcaaatttctaattgtcttataaatgttattttaggccgggtgcagtggctcatgcctgtaattccagcactttgggaggctcaggtgggcagatcacttgagatcaggagttcgagaccagcttgaccaacatggtgaaaccccatctctactaaaaatacaaaaattagctggatgtagtggtgtgcacctgtaatcccagctccttgggaagctgaggcaggagaattgcttgaacctgggagacggaggttgcagtgaaccaagatcgcaccactgcactccagcctgggcgacagagtaagactccatctcaaaaaaaaaaacaagttatttttatggtttgtttgaatcaggattgaaacaaggtacacacattatatgactgatatgtcttttaaatcttctactctataaatttcacctccacaccttttttttacctttgttcttcttcttcttcttttttttttttttgaagagatggcattgtgctatgttgccctggctggtcttgaactcctggtctcaatcaatcctcctgctttggcctctcaaagtgctgggtattgaaggcatgaggcactgtgcctggccctctttcttattttttgccttataatttatattttgtaaaaaacaggtcctttatcctgtagcagttcccagagtctcaattttactgactacatttgtggtgttgtttaacactttgcccccttcatttccattaatttggtgttggataatttccacaataactgcaccagttgctcagtctataacactaatcaagcactgaatccaacaccaaattaatttccagtatgttactttctaattgttacatacattgtcattctaagttaagtggcctgtgaaatcagtgttaaagaataataactggctttttataataatggaatagaatacaatagaaagtatcagtgcaccctatgtaataagaataattattattttgtgaaacgtttttccaccatggatatgtgtattgggaactgggttagtatgtggaatatggttcttaggggttatggtcaaatatttgaagaacactgtaatatgtaggaattttttttaaatttaaaaacaacatatgttctttttgaagaattatataaaaaaaatagaaccactagaaataggactatcctaagcatattagtttcttgtggctaccatagcaaattgccataaactgatgatgtaaaacaacacatttattctgtcagttctggagaccagaagtctgaaatcaaggaattggggccacaagccctccaaaagctctaagggagagtccattccttgccttttccagcttgcagtggctgctggcatttcttggcattcttggcctgttccttgatgtgactccaatctctgcctccattctcatgtcactcactcctctggcttctccttttctgcgtgttgcagatctctttctgcttttctctctgttttgttgtttgatacagactttaactctgtcgcccaggctggagtgcagtggcgcaatcttggctcactgcaacctccgcctcccaggttcaagcaattctcctgcctcagcctcccaagtagctagaactacaggcgcctgccaccacgcccggctaatttttgtatttttagtagagacagggtttcactatgttggccaggcttgtcttgaacttctgacctcgtgatccacccacctcagcctcccaaagtgctgggattacaggcgtgagacaccacgccaggcctctgcctttatcttagaaacgacacttgtcattggatttagggcccgcctagataacccagggagatcttcttatcttaggatccttaattctatctgcaaagacatttttgctaaataatgttcacagagtctggcgattaggacatagacttctcttttgggggcaccacctttcaacccactacactaagtgaaaagtgaaatattgatctctacatcccccaacactccacccaggctagcatcccaaatagggaagcattaagatgtgaaaaattctgcggaacattagtgtaaagcttctagtggaaaaatgatgaccaagcataacattatgagataagagcatgagtaggtttaatatccccctggtatacggcagtgcaagtattgccctgtcttctctgcttggtgaggcctacttttccccagaattagagtaaaattattcagtatccttatattgtccttacttactcctgcaggttcatgaatacttaggggcagaatgtagggaggacatgccattcatttctttgtggtttttaggtcaacttcataatataagagagggataataagttagcttgtcatgctacatgcttgaaagtctgtcatcagtacagccacctatccaggccagacggtttccctgccagttggcctccatgggacattctccaggaaaccagcacatgagcagggaaaatccctgccattgttgaggctatcgttgtgggtgaaaagggaatgtcccttgtggtcctggaatctccctgtggcaagctctgaatagggtatgatgaattgaataggccaggaaggatcctggctcagggctagagtgggatagaaggccattatgaagtgagaaattagaaaactggtgtcaggatggggatcgctattttacacacttgagaatttagaaaggaattactgcacattcctaaactgattttttttttttttttttgactgaggctcgctctgtcacccaggctgaagtgcagtggcatgatcttggatcactgcaacctccacttccggggttcaagcgattcttctgcctcagcctcccaagtagctgggattacaggcgcctgcgcctggctaatttttgtatttttaacagagtcagggtttcgccatgttagccaggctggtctgaaactcctgacctcaggtgatccacctgccttagcctcccaaagtgctgagattacacgcatgagccaccatgcccagccaaaccaaattttactaattgataaatcaaaggactgttgttggtcatgtgataagaatagctagagctgggcgtgatgtctcacacctgtaattccagcactttgggaggccaagatgggaggatcacttgaagccaggagttcgagaccagcttagtcaacatagcaagaccccatctctaaaaaaaaaaaaaataataagtaaaataaaaagaatagctggggactaatgagtgtggacagtttgtaaaaataaattgaaatattgttagtcttctttatattcctagaaatcgatgctccacatgcatcccacaactccttacaactccccgatacaaaaatactcactgtaagaaaaaaacccataaaaccaaactaaaccagacaatagaaatcccaataatctcattacacaaagaaaagcccctataagcattttgtgtaatcctctaatagtacatttctgttttcatctaaagtactttcatttgaggctgggctcagtggctcacacttgtatctcaccactttgggaggctgaggcaggagaatcttaaggccaggagtttgagaacagcctgggcaacatagtgagatcctatctctacaaaaagtaaaaaattagctgggtgtgatggtgtgtgcctgtggcctggctgtttaggaggattgcttgagcccaaaagtttgaggctgcggtgcattatgatcgctccactacgctccagcctgggtgacagcgagaccctgtctcataaattaaaaaatgaataaatgaatgtactttcatttgaacaaaccagtgttactgctgaaacatttatttctgtaatgacccttgtcttcctttcttgtacaggaaccagtagatcctctaaaggaagaagccttattggtaaggttgatggcacatcccacgtcactggaaaaggagttacagttgaaacagtcttttctgtggatgagttttctgcatctgtcctcactggaaaactgaccactgtcttccttccaattgtctacacaattgtgtttgtggtgggtttgccaagtaacggcatggccctgtgggtctttcttttccgaactaagaagaagcaccctgctgtgatttacatggccaatctggccttggctgacctcctctctgtcatctggttccccttgaagattgcctatcacatacatggcaacaactggatttatggggaagctctttgtaatgtgcttattggctttttctatggcaacatgtactgttccattctcttcatgacctgcctcagtgtgcagaggtattgggtcatcgtgaaccccatggggcactccaggaagaaggcaaacattgccattggcatctccctggcaatatggctgctgattctgctggtcaccattcctttgtatgtcgtgaagcagaccatcttcattcctgccctgaacatcacgacctgtcatgatgttttgcctgagcagctcttggtgggagacatgttcaattacttcctctctctggccattggggtctttctgttcccagccttcctcacagcctctgcctatgtgctgatgatcagaatgctgcgatcttctgccatggatgaaaactcagagaagaaaaggaagagggccatcaaactcattgtcactgtcctggccatgtacctgatctgcttcactcctagtaaccttctgcttgtggtgcattattttctgattaagagccagggccagagccatgtctatgccctgtacattgtagccctctgcctctctacccttaacagctgcatcgacccctttgtctattactttgtttcacatgatttcagggatcatgcaaagaacgctctcctttgccgaagtgtccgcactgtaaagcagatgcaagtatccctcacctcaaagaaacactccaggaaatccagctcttactcttcaagttcaaccactgttaagacctcctattgagttttccaggtcctcagatgggaattgcacagtaggatgtggaacctgtttaatgttatgaggacgtgtctgttatttcctaatcaaaaaggtctcaccacataccatgtggatgcagcacctctcaggattgctaggagctcccctgtttgcatgagaaaagtagtcccccaaattaacatcagtgtctgtttcagaatctctctactcagatgaccccagaaactgaaccaacagaagcagacttttcagaagatggtgaagacagaaacccagtaacttgcaaaaagtagacttggtgtgaagactcacttctcagctgaaattatatatatacacatatatatattttacatctgggatcatgatagacttgttagggcttcaaggccctcagagatgatcagtccaactgaacgaccttacaaatgaggaaaccaagataaatgagctgccagaatcaggtttccaatcaacagcagtgagttgggattggacagtagaatttcaatgtccagtgagtgaggttcttgtaccacttcatcaaaatcatggatcttggctgggtgcggtgcctcatgcctgtaatcctagcactttgggaggctgaggcaggcaatcacttgaggtcaggagttcgagaccagcctggccatcatggcgaaacctcatctctactaaaaatacaaaagttaaccaggtgtgtggtgcacgtttgtaatcccagttactcaggaggctgaggcacaagaattgagtatcactttaactcaggaggcagaggttgcagtgagccgagattgcaccactgcactccagcttgggtgataaaataaaataaaatagtcgtgaatcttgttcaaaatgcagattcctcagattcaataatgagagctcagactgggaacagggcccaggaatctgtgtggtacaaacctgcatggtgtttatgcacacagagatttgagaaccattgttctgaatgctgcttccatttgacaaagtgccgtgataatttttgaaaagagaagcaaacaatggtgtctcttttatgttcagcttataatgaaatctgtttgttgacttattaggactttgaattatttctttattaaccctctgagtttttgtatgtattattattaaagaaaaatgcaatcaggattttaaacatgtaaatacaaattttgtataacttttgatgacttcagtgaaattttcaggtagtctgagtaatagattgttttgccacttagaatagcatttgccacttagtattttaaaaaataattgttggagtatttattgtcagttttgttcacttgttatctaatacaaaattataaagccttcagagggtttggaccacatctctttggaaaatagtttgcaacatatttaagagatacttgatgccaaaatgactttatacaacgattgtatttgtgacttttaaaaataattattttattgtgtaattgatttataaataacaaaattttttttacaacttatttctgagttgtgcgtttgttttgagggaaggagtgagagaaggcaggcaacagcttcacccctctaaaagtggacactcacaccaaactctgtgacaacggtttttcatttaaaaatgtttcagaggccgggcacagtggcacacgtgtgtaatcccagcactttgggaggccaaggtgggtggatcacccgaggtcaggagttcaagaccagcctggccaacatggcaagagcctgtctctattaaaaatacgaaaattagctgggcgtggtggcagacgcctgtaatcccagctactcgggaggctgaggcaggagaatcgcgtgaacccgggaggtggaggttacggtgagccgagattgcgccattgcactccagcctgggcaacaggagcgaaactccgtctcaaaaaaaaaaaaaaagttttagaattctttctatacctgcatctgtaggttgaccgcttttcaaggatacaggctatttaacattttgggtatattgtgatgtatttaattaattccctaccaacggctccttaggttgtcatccccccacccttctttttttgacttttaaaacagtgctgcacccagaagtccagagtcgctgacaggtcctctgttatctaggtgttctcttcaagattccatttggtcatgcagccttggagaaataggaatgggatggaacttgccgtgtttatatttaatctcttaccttatatgcgtagtgtttcttttgagttgcgcataaatattccatttttgttttctacaaaaaaaaaaaaaagtgctgtatcaaatatctgtatacagacatctgtgagcatattttttgaggataagtttctagaagtagaatggccagctcaaaagttagatgctcattttaggttttgataagtcttgccaaattgtcttcagtaatgtatatttctaccaaaatggtatatttgcacctgtttcctgaaatgctcatccacattccatgctatcaatctttggtttcccaatcttattgttgttttactgaagaagcagcacagcctggtggctaagagtgcaggtcctgggctgtgctgaattctgactccatcactgcttacattagggatgtttttattacctcaagaagtaagaaaaaaaatgcgactcatttgtcaaatggggatagtagtatctcagtttcctcacttgtaaaattaggataatagtatcttcctcataaagttatgagaataaaattatttggcacgtttatgtggtcacaaatattaaataatattattattatgctctgtggacaagacctgttttctgctctgccccctttcacttcagtgtcactgctttctttgcctgttctgctttgagtctgattgcaggcctgtgaagttgtccccgtttgtcaggtgagaaatgagaaaatggtgggaacaggataaaagggagcaggaacaaatggctcacagagccccgaaggccatctgtagctgacctccacctcagtggagaacatttttttggtgtttgtcatttcttggttttttttttttttttttttttttctggtggggggtggacagggtgtcggtctattacccaggctggagtgcagtggctatttccacgtgtgattccactactgatcactatgggagtttttcctgctgcatttccctcctgggctggttcaccccttcttaggcaacctggtggtccccttctccttggaggttaccatattaatgctgaacttagtgcagacaatgatcagcatagcccactacagcctcacactcctggattcaagtcatcctcctgcttcagcctccgtattagctcgggcctacaggaacatgccaacactcctggctatagtctttttttttctttttgtaactatgcaaatctcttttttgtggctatactttaagaataaatgtgtatgaatgtgtgtacatacatatatactttaacttctaaatcagtttatataaattgtcctcataatttttttaactcattcactgtttctcattaatttatttttattttttttttggtagagacagggtcttgctatgttacccaggctggtctcaaactgttgaactccagagatcctccctcctcagcctctcaaaatgctgtgattacaggcatgagtcactgtgccctgcctgtttctcattatttttaatgaccaggtagtatttcatgtatgaatgacccaacatttagtcagaagtacctattaaagaacagatatttttcttggtttattttcaccaagcctttgaatctacattaaaaagtacaaaagaaccaggcgcggtggctcacgcctgtaatcccagcactttgggaggccgaggcgggcggatcacgaggtcaggagactgagaccatcttggctaacatggtgaaaccctgtctctactaaaaatacaaaaaattagctgggcgtggtggcgggcgcctgtagttccagctacttgggaggctgaggcaggagaatggcatgaacctgggaagtggagcttgcagtgagccaagatcgggacactgcactccagcctgtgcgatagagcaagactctgtctcaaaaaaaaaaaaaaaaactaaacaaaaaagtataaaagaaatgatttgagaaattaaaattatttgctaaagcaaaagcttattttttttttgagatggagtctcgctctgtcatccaggctggaagtgcagtggtgtgatctcagctcatcgcaacctctgccttccaggttcaagtgattctcctgcctcagcctcctgagtagctgggattacaggcgcccgccaccatgcctggctaattttttgtatttttagtagagacggggtttcaccaggttggccaggctggtctcgatctcctaacctcaggtgatccacccaccttggcctcccaaagtactgggattacaggtgagagccaccgcgcctggcccagcaaaagcttttcaaatcgttttgttctgcctttgaaaagtggcttagaaaaccccctggtctatctgaattaggctcctgattggaagcatgaggaactctggccctagcggagtagtaccttggatgtggttgtctttgctcttgtgttatatgtcatactgtggtctaatttctctaaactgagtcctaaaatgtctgaaaatgtaaatactttgaactccacaggcttatgtactaacagtgaggcctcttaatttgaaagtgaacgaagatttgcagtcctgatgctcaggacaaaggccagtgctaaactgactcggctggagttgttttatgggctttttcctaacgtgtcacctcagtggtttgcagcaggagtttcaaacctgtaattaatttcctggttatcaaggtttcataaactttagggctataatctcatcagtatgcatagtttagtgattacaactttgttcctgaaacattaaccctttggaggcccctgagaggactataatttattgcagaatcaaaggtagtacttgctgtcctccggatcttgattaaaatgataagtttttgcttgggtgtttagatgtcttctcaaaaagaagtttctgatgtggccagtcctttcctgacccccagttctgaagacaaaaaccaagcccttagtgatcagggatctagccctacattttattcaagccttggaacttcactgagatgattgtcccacttaaatgtcaacaattagagtgactcagaccaaccttggaatgcctctctggagggacagtttgaaatattccgtgatttgagtatgaactgctcttgcctctaccagtgggtcaatctatggactgtttcccagcctttgtctttattggtgagaaattaagcctgaccagagttacagacaacctccggtaaaaaccacagcccaagcctgcgggcccatcaagaacccagcagcagtgtgagtggttcaatccttcatcctgtgaaaggaaaataaatcctgtggccccaaaatcactaagctaatgggaaaagtcaagctgggaaccgcttagggcaaacctgcctctcctattcaaagttacccctctgctcactgagacaaatgcatatctgggccgggtgcggtggctcatacctgtaatcccagcattttggcaggccgaggtgggcggatcacgaggtcaagagatcgagaccatcctggtcaggagttcgagaccagcctggccaacaaggtgaaactccgtctctactaaaaatacaaaaaaaattagccgggcatgctgctgggtgcctgtagtcccagctacttgggaggctgaggcaggaacatcgcttgaacccaggaggcggaagttgcagtgagctgagattgcgccactgtactccagcctgggtgacagagcaagactccatctcaaaaaaaaaaaaaaaaaaaaaaaagcatatctgattgcctcctttctagaggctaatcagaaactcgaaagaatgcaactgtttgtctctcatctacctatgacctggaagccccctccccgcttcaagttgtcctgcctttccagaccgaaccaatgttcatcttacatacgttgattgatgtctcatgtgtctctaaaatgtgtaaaaccaaactgctctgagcactgtgaaccctaaacatttgagacagttctcagttaatttagaaagtttattttgccaaggttgacgcatgcctgtgacactgcctcaggaaattctgacgacatgtgcccaaggtgatcagggcacagcttggttttacacattttagggagacatgaaacatcaatatatgtaaaatgtacattggtttggtctggaaaggcgggataacttgaagcaaagaccagaaaagcagggaagggacttccaggtcacagataggtgagagacaaactctcttgcattcttttgagtttcttcctttccaaagaaggcaatcagatatgcatttatctcagtgagtggaggttgactttgaatagaacgggaggcaggttcgccctgtgcagtttccagtttgacttttaacttttagcgcagtgattttgggggcccaagatattttcctttcacaccaccttgggcacatgtcgtcaggacctccagaggctgtgtcacgggcatgtgtcctcaaccttagcaaaataaactttctaaattaactgagacctgtctcaaatattcagggttcacaattccacaaacattcattgcaacattactgcattattaaatgcaaataattaaattaggatttccaccttaacagctatccagttgaggggttgatgttctctcagtggaatacatcaatatttaaaaaaaaaacacaaaccccagaaacctaaccctccagtatatgggcttctcaaaagcctttaaagcatagcttattccagagctagatcctgagacaggcagaaagtcaaagtaaatgtgaaggacaagaagtttccagaagggccactactatggcttacccccctaaccactgctttgtttacaccattgcttgagcccagcagttcaaggctgcagtgagccacgaagccatgatcacactagtgagtagctactacaccccaccctgaggaacatagtgagacctcatctctaaaaaatgaaaaataaataaaaagaagaagaactgaatagaatagaatagatggcaaataggcatattgaaacataaaagatgcttagccttagtcattagaaaaatgcaaattaaaaaacccatacctattgagtagctaaaataaataagtaaatctgagagtataagtatataatgagaaatgaacaccctccctacccaccacatgggaacccgtttatacgccctctgtatattctttgagatgtttttatgcatgtataaacatgtatacatgctttttaaaaataaaaggagttacaccatgtattagttaaattacacataaattacctcaaaatttagtgtcttaagacagtcataaacatttactaactttcacagtttctgtgggttatgaattcaggagcagtttagcccaatggttctggcttaggatctcatgaggtaccaggtaagatactggctggagctgctgctagctgaagatgtgacgggggctggaggatcctccacagggctggcatgttggtggcagaaagcttcagttcccctccacgtgggcctcttcacagggctgttggactgacctcataacatgaagattggtgttccccaaaatgagtgatccatgagaacaaggggaaagccacaatgcctttcattacttagcttcagaggtcacacaccatcacctccaccatgctagctccaattgcttggtcagacaagctagctccaattcaatctgggagaagactacctagcataaacaccaggaggcgaggatcactggggattacatgggaggctggtttctgcattatatacgtgaacacatcttggatatgattgccatgttagcatttacagattgacctcattattttaaatggctatctccatgtgcacatataccataatttatggaatccagcttatgctatacttatattgctatataaataatatttgagtggaaatctgtacatacttgttaattcaatattcttccaccacgcactatgtgccaagtcatcttctaggcagtaaggaatattgtggagaacaaaatagacaagaactctattctcatggagtttactttctgattggagaaagactgaaaacaaaacaaaatatccaatagtagtaaatgctaagagtattttatattgggagatcagggaaggtttctaaggaggtgaaatttaagtggcaatgtaaagggcaggagagccagccatgggaggatcccaagcaagggctttatgggaatgagtaagggaaggaagagtatgagcaagtaggctggagagaggcaagagcttgataactgaagggaactgtaagggagtaaggagcttgattttctttctacatgggatgccataggtttgttttactgcccatttaaaaaatcactggtggccgggcgcggtggctcacgcctttaatcccagcactttgggaggccaaggcaggcggatcacgaggtcaggagttcaagacctgcctgatcaacatggtgaaagcccgtctctactaaaaatacaaaaattagctgggcgtggtggtgtgcacctgtaatcccagctactcaagaggctgaggcaggagaatcgcttgaacccgggaggcggaggttgcagtaagctgagatcatgccactgcactccagcctgggtgacagagcgagactccctctcaaaaaaagaaaaaaatcactggctattatgtggaatagggattatagaaggacaagatgagaaagcaagaacaatttggagtaatccaagcaagaggtgatgttggcttgaattagggtggtgctaacagagagggagagaagaagcctaaagtcaacagatgtgaaaagaagaggaatcaaagcttgtgcctagagtttctgcttgatggataatggtgaaataattaggagtgagcatgtttggaggttgaaagttaagagttctgttttgaccatggcatcttgagattgagatgcctgttagacatccaagcagcattgttgagtaggaggttgggtgcggtggcttacacctgtaatcctagcactttgggaggctgaggtgggaggatcatgtgagctcaagagtttgagatcagcctgggctacgtggcaaaaccctatctctacaaaagataaaaataattagcccagtgtggtggcatgcgcttgtggtcccagtgttactcaggaggctgaggtgggaggattgcttgaacccaggaggcagaggtttcagtgagctgagatcgtgccactgcactccagcctgggcaacagcgcgagaaaaaaaaaaaaaaagaacttggtgaggttacctatgttactagaaaggggtccagatccagatcccaagagagttttcttggatctcactcaagaaagaactcagggcgagtcgataaagtgaaagcaagttgattaggaaagtgaaggaataaaagaatggctactctgcagacagcagcccccatagctggtggttgcccatttttatggttatttcttgatgatatgttaaacaaggggtggattgttcatgcctccccattttagaccatatagggtaacttcctgatgttgccatggcatttgtaaactgtcatggtgctcgtgggtgtgtagcggtgaggataaccagaggtcactctcgtggccatccggttttggtgggttttagccggcttcttcactgcaaactgttttatcagtaaggtctttatgacctgtatcttttttttttttttttgagatggagtttcgttctttttgcccaggctggagtgcagtggcatgatttcggctcactgcaacctccacctcctggttcaagccattctcctgcctcagcctcctgagtagctggaattacaggcatgcatcaccacacccggcaatttttttgtatttttagtagagacggggttttgccatgttggtcaggctggtctcgaactcctgacctcaggtgatccacccgcctcggcctcccagagtgctgggattacaggtgtgagccaccacaccaggccatgacctgtatcttgtgctgacctcctacctcatcttgtgacttagagtgcctgtctgggaatgcagcccagtagtgttcagccttattttacccagctcctattcaagggttgctctggttcaaatgtctctgacacctagtggagagaatatagatgaagaaaagagggccctggacagaggccttcagcatgtagactcttttgagcagaggaagggccagtaagagacactgagaaggaccagccactatggcaagaagaaagtccagcaaatatgctgtcaggaaagccaagggcataaaggacagagtaatcaatcatggtgaaaattactaagaagccaagtgagatatgaacagaggagtgactacctgagcttgcccttggagaatgttggtgaccttggcaagaccaccctctcagtgatgtgatggggaaaggaagccagaatagtgtgttcaagaaagaattagaaggaaggaagtccacacaatgacagtgacaatcccttacagcaattttaattgtgaaagggagcaggggaatgcggaggcaagaaaggcaatgagagtcattcagcagagagggagacagtgtgtctttgcatgtattgtatttctataagtgaaggtggaaggatctcttgagcccaggagttcaaggccagcctgggcaatgtggcaagaccctatcgcacaataacaacaacaaaagtagccaggggaggtgctgtaaacatattgtctcagctacttgggaggctgaggcaggacgatcgcttgagcccaggagttaaaggctgtagtgagctgtgattgcaccactgcactccagcctgggcaacagagagagactctgtccaaaaataaaaataaaaaaataagaagtggaacttctgggtcaaaggatacatgtaattttgattgtggtaagttgccctcctaaggtgttgcaccagttacacacttgccaaaaatgtgtgtctgtttatctagagtgttgtaaacaccacattttcatggtcttttatttgccagtctgaacttcacaaattttgagtgtaatgataatgcaggaccataagcatctaggaagaaatagagctttgctttcttcctttatttactgttgggaacaggtcccccaaaatctggccataaactggctccaaaactggccataaacaaaatctctgcagcactgtgacatgttcatgctggccataacgcccacgatggaaggttgtgagtttactggaatgagtgcaaggaaca

SEQ ID NO: 345 - DNA, 94578 bp, Homo sapiens
acctccttaagctgataagcaacttcagcaaagtctcaggatacaaaatcaatgtgcaaaaatcacaagcattcctatacaccattaacagacaaacagggaggcaaatcatgagtgaactcccattcacaattgctacaaagggaataagatacctaggaatccaacttacaagggatgtgaaggatctcttcaagtaaaactacaaaccactgctcaaggaaataaaagaggacacaaacaaatggaagaaaattccatgctcatggataggaaaaatcaatatcatgaaaatggccatactgcccaaagtaatttatagattcaatgtaatccccatcaagctaccaatgactttcttcacagaattggaaaaaactactttaaagttcatatggaaccaaaaaagagcctacattgccaagacaatcctaagcaaaaagaacaaagctggaggcatcatgctacctgacttcaaactatactacaaggttacaataaccaaaacagcatggtgctggtaccaaaacatatatagaccaatggaacagaacagaggcctcagaaattacaccaaacatctacaaacatctgatctttgacaaacctgaccaaaaaaagcaatggggaaaggattccctatttaacaaatggtgctagccatatgtagaaagctgactaatgtaccgcataattggtacattgtcagctccaaaaaggaactgctatgggatcttgggctctccaggcctcagtttcttcatctggctgactgtcgtggatcggaggagatgatctccaagggccttttcagcttggagtgttgctatgggatcttgggctctccaggcctcagtttcttcatctggctgactgtcgtggatcggaggagatgatctccaagggccttttcagcttggagtgttgcctaaggagtgaccgagggaggaggcagctgtgccaaggtccccggccagccatgggtgactgactagccatatgtagaaaactgactagccatatgtagaaagctgaaactagatcccttccttacaccttatacaaaaattaattcaagatgaattaaagacttaaatgatagacctaaaaccataaaaagcctagaagaaatcctaggcaataccattcaggacataggcatgggcaaagccttcatgactaaaacaccaaaagcaatggcaacaaaagccaaaatagacaaatgggatctaattaaactaaagagcttctgcacagcaaaagaaactaccatcagagtgaacaggcaacctacagaatgggagaaaatttttgcaatctacccatctgacaaagggctaatatccagaatctacaaagaactcaaacaaatttacaagaaaaaaacaaccccatcaaaaagttggcaaaggatatgagcagacacttctcaaaagaagacatctatgcagccaacagtcacatgaaaaaatgctcatcatcactggtcatcagagaaatgcaaatcaaaaccacagtgagataccatctcacaccagttagaatggcaatcattgaaaagtcaggaaacaacagatgcgggagaggatgtggagaaatgggaacacttttacagtgttgctgggagtgtaaattagttcaaccattgtggaagacactgtggtgattcctcaaagatctagaactagaattaccatttgacccagcagtcctgttacagggtatatacccaaaggattataaatcgtgctcctataaagacagaggcacacgtatgtttattgcagcactattcacaatagcaaagacttagaaccaaccagatgtccatcaatgatggactggattaagaaaatgtggcacatatacaccatggaatactatgcagccataaaaaaggatgagttcatgtcctttgcagggacatggatgaagctggaaactatcattctcagcaaactcttacaaggacagaaaaccaaacactgcatgttctcactcataggtgggaactgaacaatgagatcacttggacacagagcagggaccattacacactggggcctgtcggagggtggggtgtctgggggagggatagcattaggagaaatacctaatgtaaacgatgagttgattggtgcagcaaaccaacatggcacatgtatacctatgtatcaaacctgcacgttgtgcacatggaccctagaacttaaagtataatgataataaaaaagatatttgccttgactataaagcaaaattttaattgaatgtaggcttagatactaagaaaaaggataacaagccatgatttaaaaaaaaaagataatttcctctggggaaaaaagaaagaaaatgaaaaaaagaagaaaggaagaactaaagctgctgctgtttaattattaattaactattagctccttaatagttcaaaaactgagacaggtcaaaggtcagagacagaaaataaagaagtaggatatggatttaagaaatcactgggaggccttgtattctaagtacatattctaggaaaagccataatctaatttaacatctatccacattcgtgaaaatttaggttgtaaggaactgcagaatatcattagaaagggtgtttaaaaagcatggcattaggttaaataggccagtatgctaaagggagctaaacaggatgacaagatgtgttttagcaaaatagttcatgaaaatgattacttcaaaagaagttttcttatactataaacacctgtatgcaaataaactagaaaatctagaagaaatggataaattcctggacacatacatcttcccaaaactaaaccaggaagaagtcaagtccctgaataggccaataacaagttctgaaattgagggagtaattaatagcctaccaaccaaaaaaagcccaggaccagactgattcacagcagaattctactagagacaaaaaggggagctggtaccctgaaactattccaaacaatagaaaaagagggattcctccctaacacaatttatgaggccagcatcatcctgataccaaaacctggcagagacacaacaaaaaaagaaaatttcaggccagtatccaaaatcctcaataaaatgctgtcaaaccgagtccagcagcagcacatcaaaaagcttatctaccacaatcgagttgacttcatctctgggatggaaggctgggttcaacatgcgcaaatcaataaatgttatccatcacacaaacagaaccaatgacagaaaccacatgattacctcaatagatgcagaaaaggccttcaataatattcaacagcccttcatgttaaaaactctcaataaactaggtattgatggaaaatatctcaaaataataagagctatttatgacaaatccatagccaatatcatactgaatgggcaaaagctagaagcattccttttgaaatctggcacaagacaaggatgacctctctcaccactcctattcaacatagttttggaagtgctggccagggcaatcaagcaaaagaaagaaataaagggtatttaaataggaagagaggaagtcaaattgtctctgtttgcagatgacatgactgaatatttagaaaaccccatagtctcagccccaaaatctccttatgctgataagcaatttcagcgaagtctcaggatacaaaatcgatgtgcaaaaataacaagcattcctatacgccaataatagacaagcagagagccaaattatgaatgcactcccattcaaaattgctataaagagaataaaatacctcggaatacaacttagaagggacgtaaaggacctcttcaagaactacaaaccactgctcaaggaaataagaaaggacacaaacaaatggaaaaacattccatgctcatggataggaagaatcaatatcgtgaaaatggccatactgcccaaggtaatgtatagattcaatgttattcccatcaagctaccattgactttcttctcagaattagaaaaaactactttaaattgcatatggaacaaaaagcctgtatagccaagagacttctaagcaaaaagaacagaactggaggcatcacgctacctgactccaaactataccacaagcctacagtaaccaaaacagcatggtactggtaccaaaacagatatatagaccaatggaacagaacagagacctcagaaataacaccacacatctacaaccatctgatcttcgacaaacctgccaaaaacaagaaatggggaaaggattccctatttaataaatggtgctgggaaaactagctagccgtatgtggaaagcagaaactggaccccttccttacatcttatacaaaaattaactcaagatggattaaatacttaaatgttaaacccaaaaccataaaaaccctagaagaaaacctaggtaatactattcaggacataggcatgagcaaagaattcatgactaaaacaacaaaagcaactgcaacaaaaggcaaaattgacaaatgggatcgaattaaactaaagagcttctgcacagcaaaagaaactatcagggtaaacaggcaacctcagaatgggagaaaatttttgcaatctacccatctgacaaaggtctaatatccagaatctacaagcaacttaaatttacaagaaaaaaacaacaccatcaaaacatgggcgagggaaatggacagatacttctcaaaagaagacatatatgcagccaacaaacatatggaaaaaaagctcatcatcactggttattagagaaatgcaaatcaaaaccacaatgagataccatctcataccagttagaactgtgattattaaaaagtcaggaaacagatgctggcaaggccgtgaagaaataggaatgcttttacactgtgggtaggggtgtaaattaattccaccattgtggaagacagtgtggtgattcctcaaggatatagaatcagaaataccattggccccagcaatcccattactgggtatatatccaaaggaatataaatcattctactataaagacacatgcacatatatgtttattgcatcactatttacaatagcaaagacttggaaccaacacaaatgcccatcaatgatagactggataaagaaaatgtggcacatgtgcaccatggaatactatgtagacataaaaaagaatgagttcatgtcctttgcagggacacagatgaagctggaagccatcattctcagcaaactaacataagaacagaataccaaacaacccatgttctcactcataagggggagttgaataatgagaacacatagacacagggaggggaacatcacacaccaagtcctgttagggattggggggcaaagggaggcagagcattaggacaaatacctaatgcatgcagagcttaaaacctggatgacaggttgataggtgcagcaaaccaccatggcacatttatgcctttgtaacaaacctgcacatgtatcccagaacttaaagtaaaataaaataaaaaagaagttatcttagtataaaaaaggagaaaaggttgtgtttttttgtgagtgttgaaaaagcataatgagtaaagtattagggaaatgagtgcattgaggaggaggatggggaaggtagttaaatataaacctggttttatttgcaaagctttaatcttgataaacgggaccttcttaaagcaaatatcttatatagggagctcatatttgggtttcaaaatctaggttatagtccaaacgatttcaaatctgagagaaactttttttagagtccattgtacttagtgttaatatgacaacaaaccacaaaatattaagaagccagtaattatgaagaaaaaataggtaattattcaaaccaagacttaataactgaaaatgtataaataagtttgttagatctttgagggctctgccagggactattctttgcagtagctaaaacttccttttctataaatgattaacaagaaatatttgtttaattgacttgaaaaactccaaacatgctatgttcacttttaagaaagatgattattagaaagttaatttatgctaaatgaagtataaataagaactagattgcacatatgtttgaatcttgatatctttgccatctattctgtgaattggattaaggtgttctacccccagaacagaaagatgctgttttccaaaatagcaggaaagaaattagattaataaaaataattttctctatttacgtttttttgcattaattgttctgaaacatttgccttctattgccatttgcttatgatagaatcttgtgcaagaacataacaattttgtaaaaatgcagttgttacaccttgcagaatacacaatcttgagctcattgtcacagagtagataacaaaatcatgccttagagaaacagtatttatgatatgagcctttgcctgaaggaaaatgatttttagaggctgtaaaatctacctttggcttaagccagaccagcaaagagcccctgcacatggaccacacagcagtggcctctgaagacttgtttttactgaactgtgctttggtgggaagtcctcagcaccttctgcacagaaagcagcctatataatgtgctcttgttagaggcattctgctcattacatagtgacctctttctgcggacctttgggagaagtttatttttaacttcagtctcaataaaagtgtgctccttttgtacattttttggggacaccatatggtataactgataaggtttttttgtgcattggctgtttaaaaagttcacttaaacccaagttcacccatagcaaggtcgatagctttatgatatgcattttcctgttagcttttttctgcttcctgtttatgtttctacctccggttttgctttcttccctacttctaacatatgtcatctagtagtattttttattttttttaagcagccttaagtcttggggggacaagatgagagagaaatatattcattcacacatgcctaaaaatatgttgtatttagtcatttgggttttattttctgccaagaacattgtgtttcacaattattttgccacctgaagaaatatgataactttttatttaaaattctagctgctaggagtgcagagaagattattcataatgctggcaaatatgaaaccacactatcatcaccagccaataatttttaataacctactttgtgtattgcagagaagtacagttttcacaatatctactataacctagcatgctgactgttctttctagtttattttctggcacaatttatttacctctcccatttaaactccttcattggcaactaattgattttttttttggagagaaaatttttacttgattttatttaaatcttcaaatttgtggatagtttgataatttctgaatcctatactaggcctgtgggctcaggatgtaaactaatgccaatagtccctacccctgagaaaaacataattaggtcagttaaacccactgaaaaaagtccatgcaagctgttcaattatttgtttagcctgaataattaaagcttgacctctatgtgaatgtcttcagaactctggctaagtacagttgaaccagacatgccacctactgggaagagcatcaagtatgggtagaaaatagagctgcaataaaaagtaatgagcagtggatggtggtgatggctgcacaacaatgagaatgtacttaatgccgctgaattgtacacttaaagagtaacttttatgtgtattttactacaatttctaaagaggtaatgagcagtattaaaaagcattagagaatagtagaaattaatattagtaattaataccattatattcatagtatatcatattttcattataatgctaataataaatactgatagaatgcttactatgtaccaatactattgcaatcatagaattatagcctttgtcactatttctcccagtctattcataaaagaaaagctttttaaacatttttacttgtcacatctgtaaacaaggttgccacattccagactttcagaaagtctttttaatcagcaggaaggaacttcaatacaaggtggagataactaagacggtaaagccattaccaaatttcctgtcaataaaaagcaggtggggtatgaaattaactgcacaccattcctaagacattgagaagcttcttctaagtgtaaaacatgaaagtacagatgaggtagaagtggtttagatgtggaccagtggtaaaaataaaaccatcgcataagaactttgaactcttgtcattgtccaaacatcctcaatgattgtctcatctctccattagtcaatttctcacatacaacatacttttacccgtcttctccccactccagtgtcattctcctatcaccctaagcaagtcagaatcctgttcctcatgggcgtcttctataatatttccaaaggtgacccacttttaatctggtcactaccatctgtaattcacgatttggagattagggatatgtattgtatctgtttttgtgtctttccccaccctcacatcatcagttctacccaggtaattcttatttgttttgaccttgcacatacactggatttatgggcatggtacaggagatggagggaggtggataagtcattattagactatatagagagggtagggaaaatgagtaggtatgtcagagaaagcttaactgggccctgaatttgagcataaagctcttatttatcctggtttttattgatccttatcccagtcctctcttctctggagttctgcacaggttgccttcatacacatctaatatcagatgacctaggttaaatcatctccaaaagttttcacagtctgattccatcccacaaggctactcatctaattgtctttttctttactactcagggtgtaatctgttaggcttaataggctcatagtgtctatttgcttcttatgtttgtcttctctatgcaactagatgatgtatttgaataagccagagaagtgtcttttatttcctttatatactctcccctacaatgcctgtcatagtggtttgctgtgtcgatagaatgagcttaatactttttaaaaaattaaaatgatggtacatgtagagaggttaatatcaagttttctttacatgtaccaaatgcaaaatacatgtatatgttttggtggggacagttcatacaagccagagataataaaatcttaaagctctgtagtctctcccaacaatttaagtacttggatatgaaaaaccttgttatctgggcattgaccatgtaaatattattccacacataatcattttgtctttgtctacagctttccctatctctaggctatgagaatatatgaacttgggagaattaggcattcagaattttccataaaatacttctccattaggaaatataaaacaagaaaaatgctaacatggagctatcagatatttttaagtatgtgttaggcccactgcattggggcatgtgccaatatttcgtaaaaccaaaattcactgcctagtaaattgttccttcctggtctgtccagagaagtaaatggtgaaatattcatggctcttgggaacatccaagctatttggcaagagcttttccctgggtttgccaaaatggccctgaactcaaaatatggtgtttattcaaaatgattataaaaatggcatgaagtttgttatttcttttaataacttgaaagaattctggagaaataatttcatgtttcttctagtcctttcatatttttgatacattcacagctattcttttccaaattgcaattagaatgactaataatgtttagaattttatctgttggtttctcttaagtcatgattctaccgtgagtcatttaacttctttccaaagcacccagttgtaacaaacagtggtttatgtcactggagacgtactatgtagtcaaacttgtaatttcatctaagtgagatcagagagagaaataaaaagtgggtatcttttttatttcaaaataacaggggttttaatatttctacacagcattagataatagcccaaacatattattgatccccaaacaagtattttccagatcaattaatagtcattatcaattaatattcatgtctacctgtctgagcaatggattagaaacattataagtttcattttatggaagagaaagcagactaaaagtctagggatatgatcatttggtttctggtttcagttctgacactaacaagcaatatccttgggcaagttgtttaatctttggggccttatttttctcaagtagagaataacgaagctggatctcatgctccattcccatctcttccctaccccccattatttcataagattttcttgcccctattatgccttagtaaattctagatcaagagagatcctgcccaatttcagagtagagaagcccaggactagctgcgtaatttgtggggctcattgaaaaatggaaatgtcgaattccttcttaaaaaataaaggatttcaagagggtaactgcaaagcattaaatttagcatgcggtccttctgagcatgtgaccctttgcaactgaacagatcacacacatccaagaagctggccctgtagaaaacaaagaaatgttttcccccaccttccaacattctcttttgctcttaacggaatggaaatcttagaaatgttgatgggacaatgacatgaatcatgaaaagaaaggaatagtgggaatacgaatattagaaagccaatgttttgtggatgtttgaaactctcatatacattcatagggcttaccccactggtatgggcaacaggtaactctggtagtttctaaagatgctcccagtgaattatgcctcctggtatgtggtccttatgcagttcccttctacactgaatcgagactggcctgtaatttgtgttcacaacgaatagaatgcagcaaaagcaaagccctgtctcctagagattctggtatgttgtctctttgttctcattggttttaaggaacttatttatttctgccttaatttcattatttacccagtagtcattcaggagcaggttgttcagtttccatgtagttgtgtggtttcgagtgagtttcttagtcctcagttctaatttgatttctctgtggtctgagagattgttatgaatttcgttgataaaattttatatatttatggtatacataacattttgatatatgtacacgttacaggatgattaaatcaagctaagtaacaaatccataatctcacataaattttttttggttgctcttttaacactaagttttggggtggtttatttcagacaccccaaatgactgtctatctcatgtgattttaaggatgtctaaaggttccccagttgtgcaatatctacaggatcactgaatgccaagtccccagggaaaggaatgatgaaaggggaagttgctggaagaagagagaggaggaagttgaggccatagagaggaaggccctgaaagaaaactttaactgcttgccagtttggccagaggtctctttgagcaggaacaactgcatttagaccagcagttcccatgctctgttttacaggtctgagctttccagtaggtgaaattatgttttgaaactgtgtgccatgtagtaccagctagaataaagccaacattacacattcagttctaccatggttatttcagttctgttccatatctaatgaccaccaaccttgaatatcaatgtgtgcagtccttagggagaccaggacggattcacaatttcaatggggctactggaaagatgcttggctgtttttttactcatggaaagtcagaaaaatcattgttatatgggaaagacaggatattttaagtacttatttcatttgataatattgtttttctcttcactcaagaaaaaccattaaaaaatcatgtgtttgtgaaagttatccaggtctatcaattattatttaaagtaatatctgttttactagtgtgtaaaggatttaaaagagttataatgaagcattttaactacataaatattacttcatagcattttcaatcattaagaaagataagcccttttcttgttggttcttgatattttcctacctgtattcaaattaatgcagaagtaatagccattatcttacttactggtagcaaggagttacattataaaagcttcttgtataaaattttattcactaatagaaaagaaagagaaatagtggaaaactgttaacatttaacacagcgtaaaatacattgcccattctaaatggtttgaggtcttaaagagtctcttccaggggtttttgaatgttcaattctagtaaatatcacagccaaagagttccaggcgaagtgcaatactttgattccatgttttaggaatgacacggataaacctggaaatgattggggggttgaaaaagttcttcacatgtcctttggtattagtatttccttcaaaaatctgaaagccaaataagagaaaatctttaatgacaacataaatggctaaggttttttgtttttgtttttttttagacagggtcttattctgttgcccaggcttgagtccagtggcacagtcatggctcactgcagccttaaactcctctcaagtaatcctcttgcctcagccttccaaagtgctggcattgcagacatgagccatcatgcccaacccagaaaattttttatcctattagctcaaaatgagcatatcaaagaacacatagaacactctcacagagatgatcctctatcagttatgaaatcacatgccagatagatttcatctcaccagtgatctgacttaaattagtgaaaaataaacaagtctcacatggtgctgtggagcagctgcaaaaccatttctgccttcagcccgtctgtattagctgtatgactgaacaagttacttattctctgattcttcatttcctcattggcaaaataaggataataacattttacctcacagaagtcattgtaaatatttaaaaatgtatgtcaacgtaagtgcatagtaagtgccaggaagtggccaccaataaatgtttgactattgctaacatttaaaatgtgaccatgcattttaatttatttattcttgttggcatgtaccttatatcctcaactaaagtgtataactttcccccttccatcatcagcaagttccccaaggtttacacacaccagaaataaaatcactctttttttttatgacaatgatatttatcctcctatgagggcaacctggtgtagtgagaaataaaacaaaccaaaacagacaaccaggagtttgtctgagaccaggcaccttaagaactaagatttagaagacttaaagaggtggtacatgtcactgcatatttgtcaaatgcaaaatactgttattctcattatagcacagtcttcagattgctttctctttgcccagatgccactctaccttgtccaccatggaggatttcagcctgtatggtttccattccactccctgctcactgtagtggatggtatagctctttacatacatttcagaggacagagacttgcagccctgtgttataattgccgttatcttcttgatcttgagtagatcaatttctagccactgcttattgttgtttgcctatgaaaatgacaaaaacacatagataaggaagatgttaaaacctttgctttttttttagaccaagttatgcaaaaaagcacagagctcaaaaggattttgttctatcttatcccttaggattcacagtctcctagaagctttccctctttcttcttcattgccacaatatgtgtgtaaatttttattgaagtatttcacacattgtactataattgtttccttcttagcattccttactgcttaagggtagaggcttatttcattttgtttcctggtactcaccacaatgttaagacactcagttggtgttcaataaatagttgttgaataaatgaatgaataaatgagctttatttggaaaaataattaaactgctaaattatctgtgaatattattttcttaagcaaatttctttaaatactctggtaatattgctgcagggttatctgggaaataattggatagcattctctctctatttcacctgttttacaaaacacaacttctctttccccctgttaatgtcaaagagcagaaatagttcaatttcttctaatatttcaaataaatgtaacatttgagagacctgataaaaccataagtagagcttgatacacagtacagttattgtcctgtctctggcctaacaaaatgcctaatcacatggttggtgatatgtgtttggagaaagatcagaaggtctaaactgagttttagagtcatctaagataaatttttacctttgggagatttatcgtctaccataacctcattcaattctaaaggaaataatattgatatgtttcttcaacatcacccacacatacataagtgtatgtgtatatataggtgtatgtgtatatatgtgtatacacaaaaattcacatgctatatgtattttaaaagcaaattaactgaattagaatgattatatgagaaaacttttaagtctataacatcctctagtgacatctgggtggtatcttagtgtgtcttcatatcaaggttgtaccagtgatgcagagtataaccagctagaggttttcacaggcataaaagaggtagagacattttagttatggagagaacagcatctatgtgcatcactgcatatgtccagctttgattttcaacctctctaaagagaccatataaagacatttcatgtgaatggaagggggttaagtaaaacacatatttctgatcccgaattctaactttgaaatgacaccattaaaaattagcattttatctttgaggcccttgttatatcacaaagactaagagcaaattatagagagtgcaaatttttttaaaagattgtaaaatgaagtatggagtgacaaggttataccatgaacaagtctaaagagtcatctgaaaaagaattggataacatctctttaattattatttatattgctatgtaaattatataaatgtaatataacactatttttattattttaacttctctgggtgtcagctttgccctctgcaaaattgcaaaatgaggtatttgggctgcttcaaatggtggaaggagcatggcctgtttactgggagaatgggattctagtcctgattctgctaccaaactaagctaaaattatttaatctcctgtgtatttagaattaaaaggaaaaatctagaccagatgctttgctccttgctactgtaacattctgtgattccatattgggccagaatgagtttcaagacacagatatcagttcccaagactgtgtggaatccaatcttttctatttacgccaccagcaccacaattcttttttcctttctagtggcctaatttaaggataggccctggaattctatagaaagccaggaaattggagtgtaggtatcttaagggagggagatatgaggatagaaattagggaatttggatttagttggctgaagggatcatcaagttattcatgccattctgatatctcaggtcatttaaagaattaataaaaatgagtcaaatattaagagttacccccaaattaaatcacctgaattactcagtgggctaatatcagggacagtataactctctggaaggtgtttgtttaacttagatcactgattttataactctggttttgcaacattttactatgcttctagttgcctcaaggaatatcacaaagctcttaaaataaggagggcggggaagagaacaaaaaagtttagatgacatttcatttaggaaaatgaaaaaatattgctaaattgtaaagaaaaaataagagatgatgttgcaaatctaaatcatttttttatcactaatgtaagctgtctaaatgaggagttggcaaactatgatccatgggccaaatttggcccgctgcctgttttttgtaaacaaagttttattagaacacagccagctcattcatttacatattgtttatggctactttactgctacaatggcagagttgagtagttatggcagagaatgtatggcccacaaagactaaaatatttaccatctatccctttgcagaaaaattaatttgcttattattggtttaaatcaagactagaccaaaaaccacagagatgataaatgacttctctctgagacaaagttatagtcaaagctatcaagtccacagacatcctggactcttggacctaggattttaatctgcagaaacagattaaaatactcctgcttcccagatcctccatgtttgtggtagtgagggcctttgctttcttctggagccctaagagaacaccatgcatagagtatacttgaccttggcttgccaggcattcacacgtccctgggcattcagacgggcacggaagggttcccagtaatctccccaccaagatttcttaaacgaagaagctgtgatttgcttgttttctatctttccattttccatacccaggggtgtggaacatcctatcaaaagaaaagtaacgtgattaattacacaccaatattccctgcatggcttcatgcactgcagaggagataagaaataatattactaccaacaaatgacaaaaacaataaccacaacaatgaagatttattgaatccaagtgccaaatactgttctcaggctttacatgtattatataatgctcataaatatctccattttagtacagccaaaacacagtaacttgtctaaggtaacacagccacaagaatcagaaactgaattgagttcagacaatctgataccaaataccatgttctaaacatttaaactcacttcctccttctgagagtcttggaaactttggtctttgctttcaggtgacaataatcctaaattatctatatataaaaatactctgtttcttctaacaaaagctaccaagaagatacaatggaccctcagtcactatttaatattttctgtttcaacccttagagggtaattcgagttatgtaccctttggaatttttccaaggtgtaatttgaatatcataggcagcaaggcagacctgtgactgtaagaaacacagctagtgagtgaacctggctgaccacccatcatctctgtgacactttgttcttgttggtaaatcatgcagaaattttcttgaagtgatgccttactttctccatgaaaaaaacaaagggtcctaaaaataatacccactgctaataattacctaagtatcaagaaaatgaataagaagaaaataatgcttcttgtataaaaaatagatgttttaaataagttagcagaattgaatgtcacattttagggtagtttattaggatctgaacaaatctatttataccatatggaaagaaaaaaacgcaatgacttatggaactgtttcaaggagtggtcctgccgatacaagatctgtgttttatttgggagatgttttagactactgctatctggacattggcaaaatacccatatccatccaagggtatactgtgccattatctgcttcaacaggaaactgattccaggtttcagctactttctccattgtgaatcatggtggcttctctccacccaaagggaagtactgcaactcctgacaggtgtgccacggcaggtttctagtgcacctatttattgatccctcttcccacctccagcccttcagcagccaagtggggcctggatcagccaagccttagatttattgcttcattcttttacctcagaatgccaggcagatattattttctttgtgtgctttgaagtaaaaaatattggaaagcactgctttaagagtccaagaagaacagttaagactcttaaacatccttgctatatatagtagaattttattatgaccatttatgattacctggatttatttataccacaggtcacattacagcccctgagaaatagcagctaacatagaaaagacttgagtacctacacagggtatgaaagaaaatataaagaagaattgtggtttcaggaagttgggaagccaattcagatttcaaaaacactcattgaacaccatatatatggcagtgatgttgccagatactgtcatgacattgaagtttgagtgacctgaggactttggaagagtcaggcctagtttgaatctcaggtaggtcttattgaaaatgggctgatggaggtaattccaaattagagcccttccttggagagttgtgatgtgtctatataatccaggcactttcttcacagagatgctgtcggcactctgattggcagaaccattcttggtctagatcacactgagagtttacctgagtagaacctctgtttcacaaaggttttcctaggagcctaagtcactgaaaagaactaaaaattctactcattctcctatacctcccaaatcttgattctttgagtggcagtgagaaaataatgcatctttgtaccttaccatttacctcacaaccttgcagttccaatcgaagggtaggtctgttataggctcgagttggagagatcctaatatatctagccacaataggtgggtcaaactgattctcttttattgtagaggcatctgaattgccattaaaatactagaagaaaagaggaaagtttagttatgtaacaatgatctataaagtgactttatattaaaattttgatctaatttaatattgtaatactacattttcatggggtccaaactaaatcaatttggttataaaatatacttggggataattccagttccaggaagattgtatatatgtactttgccctattcctcctgctaagtacaactaaaaactttggacattatagctcagagaaacataagaccctgaaaagagctcagaagacagactggctagggttctcggaaggaacaaaatggtgatcagtgtcttgaattttctttttgcctcataaatcccagacttagagatgaagaagccggcaacctggaaacaccaatgagtacagactgaaaaagcccaaataaaatctgctttctctaaccaaagtaccagtaaagggcagcatagcgagatatgatagaaaactggtggacactgacttctgtcctttagtcaaacaccacagaaaaacctgaggcccctccccaacccacaacagcaaaggctgaatggggagcctagacttctatgctcctgaggctaaagaggcaccctacaccctcactggggttgtgtcagaaaaggccatgtagggatttagggctttcatctccagcccctaatgaagctcctgcccctgcagtatcagtggaggccaaatggggaacttcccttcccacccagccaccaaggaacaatcccttcttaggtggcaatggagtggggaacctggactttgacccccacttggcagtaaacaggctgtgccctaccccttttcctgacagagcaatgtcagaaaaagccaactttttaaaacagaagattggagcaggtatcggtaatactgaaaacagaaaaacaatagagaaaaatcaataaaacaaggctggttctgtgaaaagattttttttttttttttttttttttgagacggagtctcactccgtcaccaggctggagtgcagtggcgtgatctcggctcactgcaacctctgccttccggattcaagcgatactcctgcctcagcctcccaagtagctgggattacaagtgcacgccaccctgcctaattttttttaatatttttagtagagagggggtttcaccatgttggtcaggatggtcttgatctcttgacctcgtgatctgcccacctcggcctcccaaagtgctgggattacagacgtgagccactgcgcccggccaagaagatttttttaaaatcgacaaatctctagcaagattcacacaaaaaagaaaggaggggcagatgacaatatcagagatgaaacaggcaaaatcactacaaacatgaaaaaggataagggaatatacaaacaactctacacatataaacttaacaacgtagagggaattgaccagttaattgaaatatacaaagtatttcaattcacccaatatgacatagataattttaatagccctgtaactatttagaacataggatctgtaatttaaaaactgcccaaaaagaaatctgcaggcccagatggtttcactagtgattcctaccaaatatttaaagaattattaccaattgcagacattttctcctagaatgtagaaaagagcatgcttaccagttttatgaaagctagtataactgtggtatcaaaaacagaaaaagacaattaaaaaaataaaactatataccaatatcctctcatgaacatagacgacaaaatctttatgctatggactcaactgcaatctgtgttttctctcataatactgattagtaagaaccataatttaggatttcaatggttctgagacatagtataaataattattaaaaataggtaactaataaacagtaaataattttatataaaatataagcagaaacagactcaaggttattggtataataatggcaggcagactccttgcattcagacttctttggggaagggaatagagaggaggagaagagttagggcttatggctgagcccctggaagaaccagaaggagaatgtcattcctcaggcatggccccccaaaaagtctgagaatcacactgcctcagaggcttactagcattaacactactatttacttcaggtacactgaaataaagaacaaaacaaactacaatagtaaaatcaaaagtcttggtagccaatttttagcatgagctccttgaggcgcaagaccagatgttctactctgccgtataccattggccagtctgagaaatctgggtattttgtttgatgataaaatgattttttaaagttttgtggggttttgaagtttcagtaaccctgcttctctctttaatttgtaagacacagacctatcatattactgcttttctccatatgacccttagaaagccattcacatttctaatacccagaaaggtattttttaaaatacataatcattaggtatagtcataataattctaggccaagtctagagtctagagattcagatagaaatatgcacacaaaccatcacattccttgtgctgttccctttgaagatctgccagttgatctggttggaactgtaagctacatagaactctgtggtatagcaggacttcaggtagtgtttggcaccttgggtctggatccctgtgattatgacttccttttgcatgtccacctgcaatataggaaagccagtaaacagaactgtccttgtcaacaagtcacacactgcctaaattcattatacaatcagctttcttcagaactaaagagctagcacataagatcttagcaaactgatacaatgactacatgcaattcatatttgggcacagagtacctaaatttgaatcccaactcaatgactaattagctgtgtgttactttgggaaggtaggtagtatctctgtgccttttgttttttaatctataaaacaagatattattagaaccaacctcagagggttgattttaaggatataaagtacttagaacagtgcctcacacttagtacttgctatttcccctaacaacattgcaagaacaataacaaggaattactaaatcactttcatttttattattacgatagcagtaaatattatcagtctattaagacaaacctggatccaaggtttagaggcaaattctgctgcaagtttttctacactccaagcattataagatccaccattgtttaatcttgctaatctgggctcccagtaacctaaactcaagggaagaaaaagatttattctgaattttttaaaaacccagcaatttctcaagtgagtttaatccagtggaaaaccagatccttggaggacctgtgttgtagtcaggagtctaggcatgggcctcagctactaggccagtccttgatgatgaaatctgggcttcaggtctgtgtttggtcaactgccaaccacctcctatcccctttcttgcacacaggtcatgtttgattttttctgttgtgtttatattcctaatgctgaatgtgcctgcctaacaggaagacatggaagggtatatgggagcctcatcatcctcttgatcatgacctcttgatcttgggaagggctttgaggcagtgtgggaaaactttggaggagttcctcacatatagtggaggttcaacaaagttttctgaatagatgaatggttgccacaggcaaagggccatattaatggggactataatgcctggctgataagaccctgtgaatctggctgaaatactacatgtgtggtcaaacccagaaaagatgactgaggagagttttggaaatgggcgcgtggtcataagagtaaggtatctgatccttgccaaatccctgcagagaggctgggctttttatgtagagaaatcaatgacccccagctatcggtttttcctggaaaagactctttgggatcattatacaccagaagaggtggcagtgttaagagcacactaacaggcctttagctcctaccatagtgttccttcctttaccatatatgtaccccaaatggagctgcttcactacattgtagtagagaaaagcataaagagaaaaactgattcatagataggattgtcatgtatggtttcataggctgcatgctgcacaactgtagggggtaccattcacagaccatggtgctacaacttacccagaaactctgaagccttgatctgtgaatcagatatgataccagtgcttagtcccattggcatcctacagtctatgaaaaacagaaaaaaaatgaataatttttgcttagaaaatatatacaataaagtaaaactccatggttagggattatgtttctgactcaataattagatatttttacctaccttgtgtggccctgacttaaatatatctgattataaaatggtaaatgcactaacaagactggtgctttaatagatatagtggcatcctagaagaaagcaactgaaatcctgaaatgtaatcattttttaaactgattttcttctgcttttatcttaaattatgctattttacaacattaggtaccatccatggccaggtgcagtggctcatgcctgtaatcctagcactctgggaggccgaggggggaggattacttgaggccaggagtttgatcttgggcaacctcttctctacaaaaaaaataaaaatacaaaatataaaaatatgaaaaaaagttctagtcctgatgagactatgttctcaaaagttgacctcaaagttacaaggttatttatatcttgatcaaggaagggataccagccactgtgctacctggatgttggcacagtgcttcatactcaacagtgcttagtaatggcttaaagaatggatgaacagatggacagatgaaaactgtgtttcctaaatgctgaaatgtcaagtttagtgactcagtcattgttaaattcctgtgaccttttccctcctcaactcttggaagctggaaaatttcttatatgcacttgtccatggatcacaagtcatgaagaaggatgctttacacaggtttcccaattgacaggaatgcttttgatctgactgatgtgttttcaatgcaatcagaccatgggccggaataaaagcaattatggctacaaattatgcctttgtcacatcagagttcttagagttgaatatttccaatctaaaagttggtaatattctagtaataggcactctcctgccaaaccaaatatcacatggctcttgtgatacctctgtccatgataagaaatggcgtttgcatccctgctctctggttttctccaacctctgtgtttaggagccaccagccaggttttgatgccttcatttcaagagttttaaatgaacctaaaataaaaagaacaacattacatttgcaaaaattaacaagtaaatattgtggttgatagttctctaagaatcctaaaattcctgcttcacaagaggctttcaaatagaatttaaccatttttctttaggtaggactgaaagtataacagataaaaacaaaacaataacaacacatacacagagataactaaaaaaaattttaaatcaccaccacacctcactagaagaaactttcacttatctaaatataatgttacaaattaactcacatacaatacagcttcacagtcctaattatcaaagtgacctcgaatgacatcattgggcttcaaaaatatcatacatgtttcctttccctcttttcatttttgcttttttctcttttttatataagaaaataaaaataaaaccttcttcctccatgttttcaagttttccataaagcttacatatttgaatagagatttacataaattgctcagaaaaaacactgaaagaatgagatttctaaaacctctggctatccattctggtatttaacattaccccctggcagttaatatttaaattctgttgactataatttatgactgtttcccagattgtgggtgaaaatgaatagatatgattatcttcctcaaacacactgaaaaatgtctccagttttcctctctccaatgcaggtatttaggtttgcagatttagagacaccagccaatcctagcttctcagtctgtctgcaggctgataggaaggatgactgatcttctaatacttgatgaaaagatgagtaaatttgactgaatctcttctgtctctgattttaatacaataaattatctattaattattatattaattaattaatatgatattaatataatacaattaatactctctagatgtattagtgagttactggcatgtgaaaaaccaataagaaccctctttttttccctgctcttaatcaaaccagtccatttggacttctgtgcctgcatctgaggcagattcacacaacgtcacccaaagtgctgtcgaggggctgccttcactaactcctcaggcagcatgtgttaggttggtgcaaactataattgcggtttttgccattacttttaatagaaggcaaaatagaaggaaggctgcttgttaaaaatacagactccttggaattctgcccaaaatctactttaaagtctctgagaacaaaatccctctgccttcacatctgcattttaactgacttcctaggtttttatactgctgcacaagtagatacacttacaaacaactcattggcacagaaacatcccttctgtataattgtagactgtttaaatctacatttatctttattttgcacatgaaaagttctaaatacctttgttattctttaacttttattattattttttaaaaatgttttcctcttcaaacagtctataagtcagtttaagaatgtgattcctggagtcacttgcccaaagatattagggtgatagggcctagaagaggagcagaactgaagaatctggaaaccctcccagcagagatagctgtagctgcctgagccctgtgggattcattttttcatctgcttaagacctcatctgtatgacacacagtggcttgggagaaactgcatgttatgttgcaactgagttgggtcacacatttagcctgtgtggtgctgcaaatagttcataaattaggtgacatttttgtactccgtatatactttgggtctatgggtttgcctaggctctatgccagaaccctgtgttctgaccccttaggaagtatatgcacaaggaagaaatgagaaggagttacagattgccttttccctgtatttcttagcagggacctcttcccattacccaatctttaccaggcagaaggggccagacccctaactggtgctgtttattgccattttccagcaaggtctggccgtgaaagtgaaccacgtgaatgtcttgggagccgcctatgttcagcaggtgtaacctcacccactcttgctcatacattttcaggccaggcaagctgtagatcatcccattaatggctgaaaggacaaagagttgaaatcaattaaaaatctgttgacacagagagggcgagtggtaaggaaatatggggcaacccactcaacacccatgttcctcatgattctgcattcccaggcctacctagccatggaaagggccctcttgtatgtcacattagtgagaggctaaagcagaaccactagtccttctcatatcattcacaccagcctacagcagaaggcagggggaactccctttccaagcagtttatcactcttttcctcagcttttacagttccgtgctttacccgtgtatactttccattaacagtcttaattttccttaactacaaaagataaatacaaatatgggcagacaaagtaaactccagggattagagtcagcaaggagatatgcagcatgtcaccttaaggccttctaaattcagagaaagtttcaggcaaattaggaagtctaggagtttataaaattaggagtttatcgttggtgtatccagcaaccatagcaagtcatgtttattctcttattggtatgacaactcctctgcccacttctcagattagataactagggttctcaggctttatctactctccccacagtaaaatacgcggattttttaaaaagttcctgagaaacttgatcaccttaaaaatgtaacacaaaactgtaaagataaagtttagtgttaccaaacgtttaactgaaaccaaagtgaaggaagtgctttgtttcctccttcttaagttagaggaactgctgtgaaatttcagaaaccaggcaggtgaatttttggagagggacgggttgagatcatttgggcatccttcaaattatatcaggcgtgagaacacctatctacatattcataacacaagctcgtacctttctcttctcagtttctgtttcagttactagcttacagggcaaattttccttgtgaatttccaaataggcacacttttcccagtgtgaccacccaaatgctctcttgccactattctcctattacctgggtacctagtttcttatctcattttgttctcatatgctttgggtgccacctggtagctgctgagagctaaaactgttagcgtcattcttattttagaaaagacacacaggtgatcatttcttttatataaacacttgtgcctttagagatccagaaacaagcttattaactttaaattgcagaacaatgttaattccttttcaatgtatgttaccagctgaagcacactggctttttgttgttgtggttttctgttggtttgttttgcagcagcttctctgtgctatctttcagactttctctttttgcctcacccacagtgtcacctgccagattacatcagccctctggaatgttaaggaaccggttttagttgtagctctgggtgtctcagaagcatctcatgtctaatcttgtgaatatctaagggcagaaatcactgtgacccagtgtgatttaattaggagattagatcaaagtctgaggaaaataccgtgaaactcatgggattttttcatttctgaggatgtgagtctccaagaacttcgggacttcttttcatagtaccagctcttcttttcatcaaaggtcataaatagtaagacaaattctctcatgtccataggcatgttgctgtccttatgtagtattcctttttggcagattaggaggggacctatcaagcctgagtgaatatctttttcctggaaaaacagagtaaattgtattgcctctttctcaggaatttccttgctcttctgataatcactcatcatatagaaaaggaaactttctgataggctctgaatttgaagatgaagattataaatgaatggcataataagcctggatatttatcacctaattctgttgtattcataatcctccttcctctgattgatctttatcccagtaacaatgatgataataataaattgataatataagggatactatttattgagaatctattactatattaaatgatttgcctgcaatctcccatttaatcctgacaactatcttatatggtaaatataaattcattcattgaacaaatatttaccaagtgcttaccatgcactatgtactgttatctcatttttaacttctgataccaggctaagagaggtcaaggaatttcctaggattatgcattgacagggtaaaaatttaaatctgagtctgtgctctttccactatgcctgaaatggaggagttgtttctctttttaattgacagataaaattgtatgcatatactgtgtatgacatattgttttgaagtatatatacattgcagaatgtcagataaaggagtcttgactttgcagttcttttcataaagaaagagcagaacatagctaatacttgttcaagaaaatttcaaataaatgccatcttctgtaaatgtaggcattctaattcatggccaatcattcaagtaatctttcctcctctccactgaataaatgtttctctctctgtcatctgaagagctgcatggagagtccctggttatgataaatgcagactgttaaccacacccttatgcattcctcatgaaaagcaagacagacatttgacaagaaataaccccgactcttccatttggtggacttcagattacgaggttaggggaatgagaaaaactttcaatgaaagtacctactgggttcacagctgagtagtaggcccaagcccgacaggcagagccaggactttctggccctgatcgctcagtggcatgccatacgtaggtataactgctatttggctgaacagcattatcttccttaaaccattcaggagagtcatcttcataagtctttccctctgatgatttttcataggaaagtccatgggcatgtagagaatacggtctggatgctaaatttttaaaacgaacctaggaaaaggaatgatccacaaatgtacttaagcttaacaaaaatctaaaccacaaaaatgtcagcattataagtcaaaatggctggttataaaatcggagctaagatataaggtacaaaataacttatgtatattatttcatttaattttcataaccatcctgtgagatatggcccaagtagttttctccagaaataccaaaagatatttgttcttaggctcaaggctaaagtactgacattatctactaatgaaatgagagtgataggtagtggagatgtgaagatgaaagaagcttgattcttgttcataagaagcttttaagctcctgctgaaacagacatgcacatgggcatccacactacaaatctggagacaacaggtgctatatacaaagtctaagtgggttcagatgacaatgccctggaggaacaatttggttgaatatttaggagtggttggaagaattaaggtaagtttcttagaggaaatggaattggccatcatagaatgaacaggagctagaaagacatttcagactctcagaagggcagaaggatgcctgtgagcaggggagtaaaggaagagtttggggaatagcaaggatctcggtggaactgggctgtgaaatgcacagggacaggtggaacctggtgagaaatgaggctagaaaaggagcaggttggggccagatggtaaaggacttaaatgccatatgagaagtcttcacaccccagcagtcagacccatgaagctcctcccagcccttctataacttctagtgattaaagactccctaattgtctgttccttattttattctacaaagccagcatcaccctaataacaaaacctggcaaagacacaatgaataatgaaaactaccggccaatatctctgatgtacatagacacaaaaatcttcaacaaaatattggcaaaccaaatccagcagcaaattaaaaattaattcatcacaatcacataggcttcattcctaggatgcaaagtggctccacatatgcaaatcaataaatgtgattcaccacataaaccgcattaaaaacaaaaacagtatcatcatctcaataaatgtggaaaaagcttttgataaaacctaacatcccttcatgataaaaaccctcaacaaactaggcattgaaggaacatacttcaaactaataggagccatctatgacaaacctacagccaacatcatactgaatgagcaaaagctgaaagccttccccgtgagaactggaacaagacatggatgcccaatctcatcactcttattcaacatagtactggaaattctagtcacagcaatcaagcaagagaaagaaataaaaggcaaccaaagaagaaaagaagttaaagtatctctcttcattggcaatatgattctgtacctagaaaaccctaaagactccatgaaaaggctccaggaactgataaatgacttcagtaaagtttcaggatgcaagattaatgtacaaaatcaattatacaaaataaaatgtacaaatgtacaaaatagcatttctatacatcagtaatgttcaaactgagagcgaaatcaagaacgaaatcccattaaacatagccacacacacatacaaaatacctaggaaaacatctaaccaaagaggtgaaagatctctataagaagaattacaaaacactgatgaaagaaatcatagatgacacaaacaaatggaaaaacattctatgcttatgtattggaagaatcagtattgttaaaatagccattgtgcccaaagcaatctacagattcaacactattttttaacaactactggaatcattttcctcaggattagacaaagctattctaaaattcatatggaatcaaaaaagagcctgaatagccaaagcaatcctaagcaaaaagaacaaatctggaggtatcacagtacctgacttgaaactatactataaagttacaataaccaaaatagcatggtactgatacaaaaacagacacataggccaatgaaacagaataaagaacccagaaataaagccacacacttacaaccacctgaactttgacaaagtcaacaacaacagcaacaacaacaacaaaaaacaaggggaaaaggactcatatttaataaatggtgctggaatagccggctacccatatgtggaagaatgaaactgaaccccaatgaatccaatgaaactggattcatcatatacaaaaattaactcaaaatggattaaagatttaaatgtcagacctcaaactataagaatcctagaagaaaaacctaggaaacaccattctggatatcagccttgggaaagaatttatgactaattcctcaaaagcatttcaacaaaagcaaaaattgacaaattaaactaaagagcttctgctcagcaaaagaagctatctacagagtgaacagacacagaatagaaaaaatattcacaaagtatgtatctgacaaaggtctaatatccagaaactataagatagttaaacaattgaacaagcgaaatacaaataaccccattaaaaagtgggcaaaagacatgaacagatacttatcaaaagaagacatacaaatagccaacaaatgtgaaaaaaatgctcaacatcactaatcatcagagaaatgcaaatcaataccacagtgaaataccatctcacaccagtcagaatggctattagtacaaagtcaaaaaatagatgctggtgaggctgtgaagaaaagggaatgcttatacactgctgcttagaatgtaaattagccactgtggaaagaagtttgggggtttctcaaagaatttgaaacagaactactattttaagggaggagaccacccctcatattgtcttatgcccaatttctgcctccaaagaaagaagaagtaaaaactaaaaggcagaaatgaaatccacaagcagacagcccggcgccacaccctggacctggtagttaaagatcgacccgtgacctaatcggttatgttatctatagattacagacattgtatagaaaagcactgtgaaaatccctgtcctgttctgttctgttctaattactggtgcatgcagcccccagtcacgtaccccctccttgctcaatcaatcacgacccactcacgtggaccctcttagagttgtgagcccttaaaagggacaggaattgctcactcggggagctcggttgttggagacatgagtcttgccaaagctcccggctgaataaagcccttccttctttaacttggtgtctgaggggtttttgtctgtggcttgtcctgctacaatttgacctagcaattctattactgggtatatagccaaaaaagaaaataaattgttcagccgggcgcaatggctcatgcctgtaatcccagcactttgggaagctgaggcaggcagattgcccgaggtcaggagtttgagaccagcctggccaacatggtaaaaccctgtctctactaaaaatacaaaaattagctgggcatggtggtgggtgcctgtaatcccagctactcgggaggctgaggcaggagaattgcttgaacctgggaggcagaggttgcagtgagttgagatcatacctctgtactccagcctgggcgacagagtgagactccatctcaaaaaaaaaaaaaagaaagaaagacagaaaatacattgttctactgaaaagacacatgtactaggatgttcatcacagcattattcacagtagcaaagacatggaatcaatctaggtgcccatcagtggtggactacataaagaaaatatggtacatatgcaccatggaatactacgcagccataacaaagactgaaatcacgtcctttgcaacaacatggatgccagctggaggctattatgctaagtgaattaatgcagaaacagaaagccaaataccacatgttctcacttataagtgggagctaaacattgggtactcatgaacataaagatggcaataaacactggggacttctagaagggggaaggaaggagatgagcaagggatgaaaaactattgggtactatgcacgctacttggatgatgggatcaatcataccctaaacaacagcatcacataatatacccagataacaaaactgcacatatgccccctgaatctaaaataaaagttaaaattattttaaaaatacacaaatgaagtcatttttatctagtgaaatccagggctaaaacaaagattcagtatttgatttttttccttttgcctaaggctccagtatgtctcaatgcaacattgttacttatcctgtctttattcacaattgtgaggttttgtttattgtggctttcgtgcattaattttgatttttaaattttttaaaaaacttcagttgctttaggaatgcaagtggtttttggttacatggatgaattgtatagtggtgaagtctaggattttagtgtacctgtcacctgagtagtgtaccctgtacccaataggtagcttttcatccatcccccgttcccttttgagtctccaatgtccattataccaatctgtctgccttcgcatacccgcagtttatctcccatttgtaagtgagaacatacagtgtctggtttttgattcctgagttacttagaataagttttttaaatattgtgttaaattatcgttcatcttgaaaaaggatcccctaatcataaaagagaatattgcctcccatagcttcatggaaaatttagaataattaagattcttatatccctatgtacttgtttacgtttttaaaaagagcaaatggtcactgaaaatgtagtgaatgcttacacaggtatagtagattatattttaaaatctagaatagcttactttagaatcagggttctttctgggtttttgaatgtgagcggttagcaaaaatggcggaagtaaactttgttataaaagcaagttataatcgtgggtctggacacaagattttgaaagaaattaccagaactaggaagacactgaagaaacttgctcacttttggagggcatggagacatctttactttccttactcattttatttaacttcattttatttaatttttaggaaaacacctgaagatatttctaaattactattactactagcactgctactgccaccaccaccaccactgctatgaaacccaattcaattgctcttgaatatattaattttctgtgttaactttagataggttagctttagatagaaattacagaaagattttccacagattatatagttttcagcatttaaaaaatgagatcttttttttttttagttcgaagattgccaaattgcttggcaaggagtctttgaaaagaaatgtaattattcattaatcctggaaaacaaacaaatcacctatagctctcttgccacctgcacctttacaaccctctggtgcttgtggaaattcctccgaagatcttagcagtgctcaaaagacttacttggataacatcatccacttcagctctgataataggaccaagaattccgagatgctcttcatactcccctcgaggatcacgtttggtaaaagtgctgtcgaggtactttcgaaaaactactttcttatatgtggtatcttctggaatatcatcagagtcttcaatatctgtttccctgaaataataatactatttgtgtaaaagaagaaattaaagactgttcccagaatttaggaaattgtctctttctaaatatagcatctagcatagagaaggtctttaataaatacttggtggataaatgagtaaatatataagtggataaaaacaaaagccagtaaatatctttcaattcctaactcaaatattattttataggtaagtcttcctatgaccttttagactaggtcaagtctctatatcaatttctcatatttctatagtattattatagtatatatagtaaattcctgtagtattcttataatatctctagaatatatattgtagattatatataatttatttgtgagattatctattaatatctgtctctcactgggtataagtgccatgaggtcagccattgtgcctagtttgctcatagtactctctccagtggtaagcacattatctgacacacagcaggaacttaataaatttttgtcaaacatataaatgaatgtataaatataatcgtatgttaacacaccaaattttaagatcaaaggcagacaaagccatgtaatgggacagtgccagagcttggggctatcaggtgacaatggtcagattaattagaaggtcacacttatgaaagtcactggatgggtgaatgttttgtaccctaaaagtagccactcttctcacatttgttttttgctaatgtccattattcttaagcttcttgacattggtgtggacaaagattttttggatttgacctcgaaagtacaggcaacaaaagcagaaatagacaaatgggattgccatcaaactcaaaagtttatgcacagcaaaggaaataacagagtgaagagacaacctttggaatgggagaatattcttgaaaaccagatatctgataagaatattaatattaaaaatataaggaactcaattcagcaaaaaacccaaatagcctgattaaaaaatgagcaaaagacttgaatagacatttcgtaaaagaagacatacaaatgaccaacaaatatatgaaaagatgctcaacattactaataatcagagaaatgcaatttaaaatcacaatgagggctcacctcacaccgttaggatggctattataaaaatgacaagagataaatgttggcatggatgtgaagaaaagggaactcttgtatactcttggtgagagtgtaaattagtacagccattatggaaaacagtatgggaggttcctttaaaaattaaaaatagaattaccacatgatccatcaatcccacttttgggtatatacccaaagaaaatgaaatcagtatgttgaagagatatctgctgtcccacgttcactgcagcattagccacattagccaagatagggaagcaacccaaatgtctataaacaaatgaatggatttcttaaatgtgatctacataaacaatgaaatactatttagcatttaaaaaaaagaaaacgaagaaatgccatttgtgacaacatgactgaaccaggaggtcgttatgttacataaaataagccaggcacagaaagacaagtactgcaggatctcacttataatgtggaaactaaaaacattgagctcatagaagcagaaggtagaacagtggttaacaaagggatacagaggtggagcattgagaaaatggtcaaaagataaaattcagttagaagaaataaatttagaagatctgttgtataagatggtgactgtagttaataacaacacactgaatttttaacattgctgagtacattttaagtgttctaaccacaaaaaagtatgtgaggtaatgcataggttaattagcttgatttagccaattcacaatttataaatatattaaaacatcatgtttacaccataaatgtgtataaaacaacaacaacaaaaaaactggggtacacccatataatggaatacatgcaataaccagatgaatctccagagaattatactgagtgaaaaaataccagtccccaaaggttacatgttgcctgattccatttatgtaatattcttgaaatgacaaaattatagaaatggagatcagactactggttgccagggaataaggaagggctatggtgggaggaaggcagatgtgactataaaggggtaatgagagggatttttatggtgatggtgaacattctgtgtcttgacagtatcaacatcagtgtgctggttgtgatatagtattatagatttgcaaaatgttacccctgggagaaactgggtaaagaatactcaggatacccaaaggatctctccgtattatttctcttgactgtatgtgaatctattttatttttgttccaaaataaaaagtttaattacaaattataaataaataaataaagcacattatttccatctagttcattggctcagtctaggactgaagcatgtcgaattctcccactgactctcacatttcccaagcctgtggaaacaagccaaacactcacccatcaaacccataatatttgctatatactgtgagtcatcaacagagaatctccttctgcctttcttctggtctacctcccctactaatcccatctttccagactctgagcataacatgcaaactcacagaacacaagggagtgggtaaagcaactccgaatgccataaaagtgggttgtgagccttgaatggaatacaagattttgaaggtggttccatccctattcactctggacaggccctgcatctcactccctcggggccttgcttagaaatactcaggtagctagttgttctcatgtggtattgagtgcaacatttaaataggaagtcataggaaaaggtgttttaaacagagttctaatgtggagatgtcaggcatcagattaatgaactcatatgcataagtcacaccatacattgtgtttgcctactgtaattacactttggttttttaagtgattagtgtaacagctttagtaaaagctgtgggcatatctagacagctgatgcacagtcatcatgctatatccctgagaatttgtagttgactaagccttgctcctttcctcctctctcttctctttctgtatcttcatcccagaacaaagagcccagttcaacatggctttctacccctaagcaaaactgaattgtaaatattcttttaaaaaagggatttggatctcttagaaattctgatctaaacaagtaaatgcaaaaaggagatttctacatcatatttgagtttggatttgaggctaacttcaattaaatcatattgattagcatatagctatggataggttgggctctgcctggagcaataagagtcagtagaaacatgggtagtaagaggagaggacacagaaaaatgcttaattacagaatattatagagttctcacagtgattgttcttatattgtccaggggtcatctaaggtaaagaagcaatcttggaattgacaaaggaaaaagaacaggccaacttgcaataggggaaccacactgttcttagtataatttgcccacaattatccccctgaattgtagtagctacttttttcagcagtaatggaaaaatgagaataaaaaaggagaaaactggccaaacctttgtacaaattctgaataatcccaggatatttcttcagcagcaatgtaataatttcttctgtttccattgttgctgcggaggtaccatgctgcaatgttgtcaggatctctggaggagttgatgtttgtcctaacatcagttttgtaggggtcatcatagggcacataatcaatttcagcatagtcatcttcactgctctggacctcttcctttggaatgatctcaatgtaatctgtaccatctttactgaggcccactataaccagtggattaaattcctttgatagaaaagtatcattgagagtaggagatgaaggagatggcatctgaccaaggtctggataaggaaaagactcattaaattcttgaagaagcaatgactgactagattcagaagggtagaatatctgatcaaggtctggaggaggtgatatctggctgagatccgggagaagggtggtgtcactgatgtctggagagagagtcacctggctgaggtctggggaaagggacatctgaccaaagtttggggaaagatctgtctcaccaaggtctggagaaagtgtcatctggtcgaggtctggggtaaggggaatttgactgagatctgcaaagaggggcatctcactgaggtctggggaaaggtttgtctgactgagttctggagagaggtttgtctggctgaggtctagagaaagggttgtatggctggggtctggagaaaggggcatctgaccgagggctggggaaaggtttgtttgactgagttctggagagaggtttgtctggctgaagtctagagaaagggttgtatggctgaggtctggagaaatgggcatctgaccgagggctggggaaaggtttgtctgactgagttctggagagagagtcatatggctgagttctggagagaggtttgtctggctgaagtctagagaaagggttgtatggctgaggtctggagaaaggggcatctgaccgagggctggagaaaggtttgtctgactgagttctggagagaggtttgtctggctgaggtctaaagaaagggttgtatggctgaggtctggagaaagggttgtatggctgaggtctggagaaatgggcatctgaccgagggctggggaaaggtttctctgaatgagttctggagagagagtcgtgtggctgaggtctggagagaggtttgtctggctgagttctggagagagggtcacctggctgaggtctggagagatgactgtctgccagacttcatgttctgaggaaggggacatttgacttatatctgtggggaaggacttgtgacttcggtcatactcaagcatttcactgagctctggagaagaggatctgtgactggggtctgaagtagagtgcatttgatcagggtcttgaatggggaatgtttgatagtgttcctctgggggcactgtctgataaagacctggaggacagcttgcctgaccagtgtcatttgaggaattctgattatggtcaggaagtgaggctatccagccaaaatccatagagggcaatgtctgattgaggtctgtgggaagagatgtttcattggatttatgaagcaccaacgaatgcttaagtcttctttctgaaaatgtgttgtaggcttcacttcttagagggtgaaaggtcctcggagataaaggagcatggtgtgtgtgcttctcttttttcttttttcgtgtcttaatgagaaactggcttttcttcagtctactctttcctccatcctgtcttacttgtagagatttatgtctaactctaggaaactttgggtggccactctgctttccaggcttgttggcaagaggggtgctttctccccaagcacgtgaggcattctgggggctgatcagccaattgttaacagctgtgtcttcatcagtatcttggattatttcatagctacctttctcagaagccaaatgccatctcccaaccaaaatcttagatgagttactttgttttaagagtaacagatcactaggagggtccttccagggcctcattctggaaggagaaccagtgtcttggctaggaaggtcctcccagggcctcattccggaaggagaaccagtgtcttggcttaggtgtctcccaactttatgtgctagtaatttcatccaggagaacctgtgctttgctgcttgatctctttctaccttgggtcccttatgcttagcatgttcttgacttttgaattctccagcaccaagtgaaagtagacgtatccctgtgacatctggctgtagaggatcctctatagggtcttcagaatatgggctggaatgctctgctgtggaagaattgagaactgagttcttgccaatgaggtgtctcagtggggaaccagctgtggtggcttgttggtgagaaggggctttctgaggttctgcaaggttattgacagtgaacttactaatattacttggggaagaataatttgaaccaacaattatatctgtgtttgaagaaacgaattcagtgccattctccagagctagggcagtaagattgaactcttcttcttcctgattcaatgatgagtttcggaatgacctgattcctaatgctgcagccagtctgttctggtaatcatagtcagcatcactctcttcatcttcaggttctaaacgatcatgcattttccgtgtagccatgactgtagattctggaggttcaaaaatctcatatgagtcttcatcatcatctgggatacatttaacatccctgaatttcagcctcagctttttgcttcttggactagaattcatggaagttaacatccaagttcctacagaagagagacagacagaagagagatctggaagtctgggaaaagacatgaaaacacaataatccattgtggcaggtaatttctaataaactttcgtcaggaatattcaagtatgggctgtggaccactgcttgtctgtgacctattgattactgggtcaaaataacacaaggagagaaaaatgagaatgaaatatttagtaaacttttgtttttctaaagcaatttgacattgctgtgactctaagcacatgaccagtgcgttcatctcgcttaacagaataaaaaacaaaagtgttgcttagtggagattagaggggaaaaaaggtctttcagcacagatagttgctcactattttaaaatatattaagaaagggatgaatcaagaataaaatggacttttaatatcataaatatcctaacagcacatcttgtcttagaattaaagggatggtgatgagctctatccccacaaataagagacatttagatgtttctaagtaataattcacgaggacaattttgaatctctgaaatggcatgcattgctggaacatcaaagatttcttggtgagtctccaatagttaccattgttggtgtctactgagtgctaggcacttggcgcatattactattttaatggtcaaagtaactctgtgagatgtgattacactgttttccagataaatgacttgtggctcagtgtggccaagtaacttgtgtaaggttacacagcaatcgattggcagatcaggacttgcattccagtctgacaaactccaaagctgttgctgaagcagcctttaaggcactgtacctgatgattgaagatgactgttgcaaaaaaccgaatagggcattttgataaaagaaatgctcttttgtggccaaaatatttatgcttcttcctcagagttatgccttatttttctgctgttgtatatttttacttcctactttgcccagagaaggaaaaatataacccacactaaagaactggatccatttaagtcattaatttctcaaagagaaatcatgagaaacattgaaagaaaagcctgcagggggtcagggagatacatagaggagcactggtagcctggagagttgcagcagacctttatagaccagaaattcaaagcaagcttcctctgtgagtgtccagactcttactcaccaacattatccattgtgaccgtcacagattctccacgcatggggaagagggtcaaggtgtcctcatgcctctttccatagatgaatgagtgcccagtgaagtggatggtcaaaatttcattctgggtccccacactacagaagtgccactggacagtgtcatcaaagcagaatccaagagtagttatgctctcaggcacatagccattgatagctgaaagtgtaaaatctgttaaaattccaagtctatgccaacaaaagggcatgtgtctaattatacctaagataaatgtctccatgttaatttggttgtgtcaaagcagtgattatccaagataagctttatctagtctaacatgtgactagaagatcaaactcagaattttcaaatgagagattattctcctaaattagccaaaggagaaatctcaggaaaaagataaagccttccatttacattgatttagtcattcatcaaatgtatagtaaatattttgtgctccattctctgcctttaaagatattctaataattccacttggaggaaaagcataatataagaaattcatctttttgatatattagtcattgggtaagaagtaatgtccctaaaaataaagcccatttagcatattttatagtttttattgctgtcttataatctacatagtattcacagtttccatttgagtatccagttcatacatttcattattgttaaaagggacactgctgtaggcaatatttttatttacttatgtactaagcatagtaaaaaaccaaaggtatgatttctacaagggcagggctcatgtctacctcgattaccactcttagccttagtaccagtataatgactggcattaacaaatatttaaatacctacttaaatcacttaagtgactttaataatttacatgatgtattattagtttatacctcattctagatgtttttctaaatggtctataactgcattgttcaatatggtagccactggctacaagtggttatcgagcacttgaaatatgggtagactggactgagatatgctgtgagtataaaatatacattgaatttcaaagacttagtaataaagtaagtctcattaatttttatattggttacatgttgaaatgataatattcaggatatactgagttaagtaaaacatattactaaaattaatgtcacctatttctctttactttttaatgttgctatcagaaaattttaaattacgcatgtagctcatacgtagtttctattggacagcactggtctagaactatgatagattcactgccaaaaggaagttatgcaaagaaagctgagagtaattttctgtttgaattatttgacctggcacctgtcagctctgataatccctagctgtcagtcatctgaagctatatgaacagaacatgcagaaatcatcctcacatgtgtgattacctactagagaaggtgattaccatgactctagactctgaggatcagtagggggaccctggctgttgtggagaagtttgcttccagctggctcagtgacatttctctcagactgccatggcagtgcttttggccactgaactttagaactgcagcaaatgccggaaccctcattcagggaattccttttgttctgaaaatcttactgatcacttgaaatgtcttcatgcatgcctttccaagactcttgggtccctatactcattttgctctactttgatgtgtcaatccatctttggattacttgccttctttctgtcctagccatatattcaccctgaactcagtctaggatactattgacatggactataacaccttccattagtcctactctctcacccttttcctcaccacgcagagtatgtctgtgtacacacacacacacacacacacacacacgcttggaatagaagatcaaacgcatttctaaggatgtgagcctttgacctcttgcttaaaaatgttgctatgatgtcacccacggatttcatcaccaagtctttggactggaagtgaggattggaggtgccccttagcgagtagattttaatccatgtctctgactctaggcacagtcatatttcaaccacaggaatgaaaaactgatgaacaaaaatagtactctgacttactgctcatgatgtttgattcataaaacttggggtcatcacgtttcacctcatcaggattttcacaaaacttgttgatgttgtcctcaaggtaccagcttttgttctcatcaaacacagcaaacacagcctgctgttcgatgtctgctgccctctggaggacaaaacagtatagtactggtacaagaacagacgcatagaccaatggaacagaatagagaactcagaaataaggctgcgcacctacaactatctgatctgtgacaaaagcaagcaatagggaaaggattctctattccataaatggttctgggaaaactggctagccgtaggcagaaaattgaaactggacccctttcttacatcatatacaaaaattaactcaagatggattaaagacttaaatgtaggcctggcgcggtggctcacgcctgtaataccagcactttgggaggccaaggcgggtggatcacctgaggtcaggagttgaagaccagtctggtcaacatggcaaaacccgtctctactaaaaaaaaaaaaaaaaagaaaagaaaagaaaagaaaagaaaattagccaggcatcgtggcttatgcctgtaatcccagctactcgggaggccgaggggccgaggcaggagaatcacctgaacatgggaggcagaggttgcagtgagctgagatcgtaccactgcactccagcctgggcaacagaacgagactccatctcaaaaataacagaaacaaacaaacaaaaaacaacaacaacacacttaaacgtaaaaccccaaactacaaaaaccctggaagacaacctaggcaatattatttgggacatagggatgggcaaagctttcatgacgaacatgccaaaagcaatagcaacaaaagcaaaaattgtcaaatgggatttaattgaaataaagagctcctgcacagcaaaagaaactatcaagagagtaaacagacaacattcagaatgggagaaaatttttgcaaactatgcatctggcaaaggtctaatatggagcatttataaggaacttaaatttacaagaaaaaaacaaacagccccattaaaaagtaggccaaggacaggaacagacacttttcaaaagaagacacacatgtggccaaagagcatatgaaaaaaacgctcaacatcactgatcattagagaaatgcaaatcaaaaccacaatgagataccatctcgcaccaataagaatggctattattaaaaagtcaaaaactaacagatgttggcaaggttgtggagaaaaaggaacacttatacactcttggtgggagtgtaaattagttcaaccattgtggaagataccatggtgagtcctcaaagacctaaagtcagaaatacctttgaacccagcaattccattacttggtatgtacccaaaggaatataaatcattctgttataaagacacatgcatgcgtatgttcattttcgcactcttcacaatagcaaagacatgaaatcaacccaaatgcccatcaatgacagactggatgaagaaaatatggtacatatacaccatagaatactatgtgaccatcaaaaagaacaagattatgtcctttgcagggacatggatggagctggaggccattattctaagcaagttaacgcaagaacagaaaaccacatactgcatgttttcacttacaagtgaaagctaaattatgagaacacatggacacatagaagggaacaatacatactggggcctatcagaggatggagggtggaaagagggagaggatcagaaaaaataactaatggatactaggcttaatacctgggtgatgaagtagtaagtacaacagacctccatgacacatgtttacctatgtaacaaacctgcacatcctgcacataagtacccctgaacttaagagtaaaaaaaaaagaaaaaaaagtgctgtattcagtcattaacattgcagcaaattatctacaccactgagttctcagaaaccaaagtgacatagttcttggaactactgaagccatataattcaggcatttatgagagtccattgtgtacacagcacttgttagagctaaaggtaatatgcaaaagcaaacagaacagataagaaaattcagagattaaaatatcccaaaagagccgggcacagtggctcacacctgtaataccagcactttgggaggctgaggcaggtggaacaccttaggtcaggagttcgagaccagcctagccaacatggtgaaaccctgtctctactaaaaaatacaaaaattacatgggggtggtggcgggcgcctgtaatcccagctactcaagagactgaggcaggagaatcacttgaacccaggaggcagaggttgcagtgatctaaaatggtgccactgctctccagcctgggtgacagagtgagactctgtctcaaaagaaaaaaaaaaaaaaaacaaatcccaaaagaaaaatctcatttcgctatggcagctgaaagtctgtctatctctgtaattgcacacctttcaacatgaatgattgactgaatatgctctgaataagtgcaaaggatgaaagagaaggttgcaatagaaaagccttatgcttctactacctgtttcctttcctagctcaataaatcaggatcttccatatgtccagaaattcatttctgctttttctaggcatatgtttattttgtatgccttgagataagacctctttggttacagtttagcataattgggaattttagtttaataatatgagactacaattcttcaatgaagacaaactcagaaattcagtatctttgttcacattcttctgtatactttagtctcaacagagatgggccataatctgggtccaatttcactaggaactatgtctctaaatttggttgctttcagagaatctctcctctgtctccctattgcaggtctctaaaaatagcaaagactggtaaagagctttatacttttaccagatggtatctcactgaacccccaaacagacctgtaacatttttaggagggttattacccatttgataaaaggaagaaattaggaaaggctaatcaacttgctcaacacatccaataccaacagacctggaatttgaaactaagacaaaatatgttatcacactctagacttgccttcggcagtgatggtactgataaaaatagacaagacaaaaaaaaaaaaagaataaatgttatcacactggtgctaaaaaggactacttgacaattactgttctcttgaaggaaatgccccattatttagccaggagacctaacatgttctagccagaagaaattctcagaatttctgaaaggttacttcaaggacaaaatacctgtattccttgcctgtccagggatctgctcttacagattagaagtagtcctattagcccagaggcgatgtctctcatgatgtccacgtcactgtagtatggtcttgttaagcactgggcatcattttctgtgggttcatcaaactctaagatgttccacttataagtataggtttcccctggttgaactgctctgatcatggtgttgttcctgcctgaaagaaaatatattcaaaattgttttcatttgcaaagttatttcatgataataaataaataaataagctttcgctggaaccaattaatattgcaaaaggaattcttttatttttattttttttaaattatactttaagttctagggtacatgtgcacaacgtgcaggtttgttacatatgtatacatgtgtcatgttggtgtgctgcacccattaacttgtcattaacattaggtatatctcctaatgctatccctccccccgccccccaccccccccccccgacaggccccggtgtgtgatgttccccatcctgtgtctaaatgttctcattgttcaattgaattctttaaatattctacttggaacctggataacatgtagccattagataatgctccactagaggccactatgacactaataaaagacaccatattttgttaccactaagagacaaaactcctgaagtgagaagggtttggctgtgatttttaggatactcctacatgtatactacctgactgcagtagtgacaccaccgggcaaggagaatagcagaaaaatgtggcagcctctcagaagttactagttggattcagtagaagtgaaagattcaaacctgaggtgaaagaagagttgacttcatcttcataaggcgagaaggtcactccatgagggtaaatgctataggggcggctggccatatttttgaacacgatctacaaagttaaatcaaatttattctaggatttaaggttgatcatgacaaataatataagatactagctttgcatattcaccttttggatggtgtgtgtgtatacatgtgtacacacagtaggaaaattagatctgtttatctgagcagtaacctcccctcatcacttggcaggagcattggagagagtgtttcactcacacattaaggtggaaaatggaaagagaagtctgactttagaggataggttaggagaagtgacgttttcctcacagtatcactctctccaagcaagtcctccttcccctgcccttctcttttcagcttgggccacatctcattttgaatctgcttctcatctctagaccatgatccccttcccctgcccggtagattttttaggacactgtctttgaagtcatcttctcagctaggttcagtggctcaaacctgtaaccccagcactttgggaggctgaagcaggtggatcacttgagctcaggagttcaagaccagcctgggcaacatggtgaaacctcatctctacaaaaaaatacaaaaattagccaggcgttggggcgtgtgcctgtagtcccagctacttgagaggctgaggtgcgagaatcgcctgagcccaggaagtggaggttgcagtgagccatgatcacaccactgcactccagcctgggtgacagagtaagacccttggtgggggggaaaagctacttgcttgagaggcacagacaaatagccagatcctgaacttttaataaggtatgtctacacttgctgagagcacataaaagggatcagaaatggaagaagggaaagaggcatggagaaaaaaaactgcttttgtcctttggctattttaaatgaacagaatagaccttgtcaggtgcataaaacacacaggagtcctagttaggctctttaatctgcaaaagagaaccttaatcctatcttctatttggttgattgtcaaagcctttggatcatcctttgtctgtagattaactacactctaggattttgtcaaagattgcaacctttaattctctgctgtccaattcttatctatcttggtgaagtgacatgacatttaaggagaattgtctgaggaaaactccgtgctcttgatacatggagtttaccttcatcagagtccaaccattagagagctgcatacctagactacattaaaaaatgagtaaaaattgtttctattcaattgtgtttactgttatatcttagctataatgagaaatattttaatgcaacttttaatctattattttatgcaacttttaatctattatgctggttataagaattttatcaaggatgccatctactgtatcactcagcactctcttttgtagaactcattaaagaagttcctcttagatcttaacatcaggataaatggtgctttctttttgtagatgatgtaaacttcaccctgacatatttccttttttacactgactgccataaagcttaggacaaaatttgaagacagccttacagggtcacatggtatctacttatctgtggctttattttctttgtccccgtattctatcccaattacatagactccttgttttatgcctttataacttgagaaactgtctcagatcctttgtattactgagtaagctgtaaataaatacaaatactaaataaaaactaaaagttgcatttgaatttaaaattatatgagcatctttttcttttaaaattaaaaaataaccaggtactccataatattttactatgtaatttctcccatgattctgtatttgtgttacttactttgagtgtgtctctgacctgggctctgataataggacccaaaatcccatcttctttcatattgggattcactgtatgtttggtgaaggactcatcttcgtactgtgtgtacataactttcttataatgttttccaatttggtttgagaaattatccaaatgctgagacctgtattttcttaaagtgaagtaaaaaaaaattaaaccactttctcaaatagagatctcggtaggatggggaaacccttgtgcttaaacattctgctcttagattagctaacatactagttctctaaaaatttcttagtgtagtttgcaaagtccttatgttttctgtctagttggaaaactggaaacttctgatttgtctcctgcatcactgataaaagtcataggtaactggttagaagcagctacttagatcttcctgtcattcttattgctacagcagacatttgatatctctgggaaaaggcctatactggctgaaaagatactaggaatttttctaaagtctgtcctatcacttattctatgatagcctttttggttttaaaggtatttcttaatccctaaaagcaacttccaaccccaggaaacatttactagcattgttaatcatagttctgtgctattgggctatctcttccaccatctagccaattctctgagctgactgaaaagcaacctccttcacccatcttttgtagctactgggataaatactttgggagcagaaacatgaaccacttttcccctgccctctttattaccttagtttgcaaaagcaactacatgcggccaaaaagcacattttaaaaagctcaacatcagtgttcatgagagaaatgcaaatcaaaaccacaatgaggccgggcgcggtggctcacgcctgtactctcagcactttgggaggccgaggcgggcaaatcacgaggtcaggagatcgagaccatcctggctaacacggtgaaaccccatctctactaaaaatacaaaaaattatattttttgtattttgtatttgtgttggcgggcccctgtagtctcagctactcgggaggctgaggcaggagaatggcgtgagcctgggaggcggagcttgcagtgagcagagattgcgccactgcactccagcctgggcgacagagcgagactccgtctcaaaaaaagaaagaaaaacgcaatgagatgccctctcatgccagtcagaatggcgatgattgaaaagtcaagaaagaagagatgctggcaaggtcatggagagaaaggaacacttatacactcttggtggaatgtaaattaattcagccattgtggaagacagtatggcagttcctccaagacctaaagtcagaaatatcatttaacccagcaatcttttaagatggaatatcattttatgaatttatttttcccagtggaaagcactgactgttgccaaacactcctggattcctatctcagttctgtcaacaattctataatcttggccaaattttttttgttctttttcctagtttaattgtttttaatagaaaatacattcacataatttttattacagtgaaaactctcacttttctctgatgactctcaaaatgacctccctaccctccctgaattttctaggtagccatatattaatttcatgcgtgtaattccagaatacctttatgtcttacaaataagaaaatataaatattcttatccctttcactcctttaacaaaaggcagctatgtatacacgctatactacatcccagctttttaatttaataacatatcttggagaactttttgtattagtacatacagagtgtttgcatcctctttttttgatgcttagtattccattgtatgaatgtatcctaatttattaaactagttttctactgatggacattttgggttgtttccagtcttactactactaacgttgcaacagtgaatatgttgtacatacatcatttcacctgtgaacaagtgtatctgtatagttagatttccagagtgagatagctgagtcaaagggtatatgcatttagaattttgatacatattgccaagttattcttcagaatccttttaccaatttaatcttccacgaacaatatatgatagttcttttttctcacagccttgtcaacagatgatgtcatctggacttgtgaatgtgatagataaaagtagtattcccatgaagtttaatttgcatttctgttattatgagtgaatttgagtaacttttcaagggtttaagagctatttgaatttccaaatctcttaatctctcagacccatttcctcatctataaaaagaaataagagcagtatctagtttgtagagttgaagcgaagctctcagaaagggacaatacagtgcttggcaatggcaaacattcaacaaaaggtagctgctgttgtcatttttattattattaggctgaatttctttggtgatttgggggtaattcaagattaatttttacaaaaagacttgaatagaaaccaatacatgtgtccccttgagagctgtgaacttacatttcaccccaaacatctaggaccctatggaatgtgtcttgaacctttgcccagtggtatgaaccccaacaactcacttgtccatattcgctggtattacaggtgcatagtcccaaatgacttcctctgcagcaatgaagtattcccacctcttcatgtgccgcctctgctcacgagttattttcttaagattcctggttttctttgggcagtttttaatgtcaatgtaagcctgcatcccagctgagttaggacagaaagacaatgaaataactcaagagaagaaattatggttgattgaaatgcatatcctttaaatcaacttgtggaaggtttatattaatataataagagtgaaagtaatgctcaggcaatttttgaacattttagtttggaactctttaagtggcatccagaaaaggcaagaattttaaaagggggaaaaggaggaggggttagggaaaaaatttggaaagattccctttatttcttcttgagcaggcaaatttctaataatttttaacttcttaagaccttatgaattaagtcttgttaaattctcatttttctgtcatctgtcccttaatctataaaatgaagtagcaccagtacctaataaaattgttgttaaaaattaaatattaataacaatacataatgcacttatcctcaacaaagaaacaaaagttacattgttgttttaatattattgggaactctatcttccacggatatcatgatggttttattacttcaaatataattttgactactcgtgtgaaaagaaacagaaatgatctcatgaagtatctcttccttatatgtgttgcttatacattattttggtaacaaaatgatttcctattgtgatatcatttccttagattttagtctccatttatatgaactctaatctcaacagttttaaagcaaaaatgtgtagtagaacaatcagttattttgtttacacgataccacataacgtgggttgatttattttcccacctgaattccccagtgttctttggagctcacccctcagtatatgccatgtatgatccattcaacacacattcattgagttcctctctgtgctagactttgtgttcatcccactgtaaaggttaatgttttcatgctaaacttttacactttctacaacttagtgcttctgtaaatttgcagtttgtcttgtgctagcatctaggtcttttttgcatatgaagtaacccgaagaaagaatatctctatgtatgcatttgttttcttcctcttttcttctttcgaggaagttagagatctctttagcttttgcttaattaaaaaaaaaaaaaaaacctttgccaattccttcgctttctccatccccaaagagcaagttataaatctaagagcaaaatatctaagtttggttgttaggaactgaggaaagtttgtctgcggtgcaggtggcttgaaagggcaagggagaaagagggagttagtgcatgggaagaaaggattctgcattgagaagcaagactgtcaggagagtttcttgccttgcaaatgttttggggtgagagaagatatgatccactttccctctgggcccacagtcatatttgcggtagtggatgtagcactgacaagggtgatggctgagaccttatgatggttctgctccaggacctggccgttgaaatgaatggagaataattctggccccgagctcattcccagcagatgccagctgatgtggtcatgggcacaaactgttatatctgagaaagagggagagacacaggccaaaataagcattcagtcaagtactctgtgatcaaacattcactcaccaagtgtattgagcacctgctgtgtgtcaggcattgtataaagctttgagggaacagacactccagttgtagtttgtgccctgcaaaagcagacatctgagtgaccagcaaacaagcagtgacaactcattgtgataaatggcattatacaggtaacaacagagcttagagatggtggatgtgaactcaaaaacacagggattgctaaaggattaggccaagaagggaaccaagaaggtaaccgactgttctggtctgaggggtttcccaagattcaggactttaactattagaactggtaaaaagtccacggcaaaatggaatgtttggtcaccccagtctgatctcagctggagggagtcaaatcaccagaaccgccaatagggctgagttcaagcacttaatcctctcagctctctagctgtagtggtcgaagctctgcctaagggaagaagatgtgaagatgatatgaggattttcaattgttatttttacttactttttgattgttttaatgacaagtcaacgaaatcactttggggttacacactctccttaaaatgcagtgtacaagtcctcattatgctgagccattgggagcttttcatggaaggagtagtgataactgaatataaaaacttagttttgctccttctttgctcctacagtcactgggaaaatgctcatttgctctgtggggagactccatccttggcttttaggtttctgttttacatctcagatacataatcactagatactagataatgggcctgagaatcagttccttacccacacaaaggcttgttttttttaggagaccattgcaacaaagccaggattccttgcatcactaggaggctttggtggaagcgtttatccatgccaaagaaatgcttatattgagttcagcaattaacatatctgtgttagcatttatcatatgtattcaatttattctgctttataaggcagagggtttttacaaatgtttactattcttagtttctactgatggtctttccctaccttgtcccatttacccccaattattcttttgggaactataaattcgtaaactctaagctcagatcaatttatttttatttttgtgcatatggttttgcttttcttggcatccatatacttatacagattgttcactctgccaggaaatagatgttaggataaatggttagtccacttttgtaagtaagcacattgagacaactaatttatccagggccacagaaggtagtctgataatctgaagtctgaactcagattatctaaggtcgaggtcagttaactaagccccagtttttacaagctcctagtattggaacttgggatcaacattgagagtcatatgagtatattttcagaaaaccaagtggaaaatgtagtcaaatgaaatagaatacaatttaaaaacactacccagatctcaactcttaacaatatttgtgttttagtaagtgaagctatttgtgattttcagatggcattagagaataacctctaagaagtttagtgttttgaaatatggtttatttagtaaagtggcattttaattttttaatgtttttccctcaggctagtatcatataccctggatctttagttgtaggtcagttctaccagagagaaatagaagagatgtggtctaagtgggaattagttattttttctcttaacgattgctatgattttgccttctcataagtgcccaaatgcaaatggaaagagaaaatattctagatgccactgaatattactcttctgtcaccttttgaaatgctggttttttttgtgtgttgaggattactcctaatctgttcatctttactgcaatcttcctgctgatccttcctgctagggcttgtccttgaagaagccatggtcatcatatagaggaactgcagaactcggagagagtggctgagctgataccttaaggtcttattcaaagtacaggccaaggtgaaacctactcaggtcactatacctaacaaggctgcacatttcttctctagcttctaatttgtctcttctatttcctgtttaaaaaaaaaaagagaaaatatttccttcttgatagggagttgcaaaacagtgagtatggtcaacttctctagtgctttgaagaaaacaggaccgaaaaattactaatgattttactgttgtttaatggtacacagccctcgtgttacctggcattgtcccattcacatatccattgactgtgtacattagggatgatgactggctccagctcttgctttcatcaaacacagcaaatagtagcacgatttgcttgtcaaacgtcttctgtgtcccaccctcagttagggtccctatgaaaggaaagacatgttttcagtagcactgcagatagaagacgctcattagctttcctggatagcaaagagtttagggcaagcaatcaaccataatgatttcaacttgaagaaattcttattttttaaaatagcatatttatcaagtaataatggttctagggttatttaaaatctggtgccacactgtcttctttgataccttcttgctttggggaacaggctttatttcatccagcttgggaagaaaacatttggtgactctcaagactctgtacaagtatccatttcccccagtctcaatagaagagtatatagatacgttagctcagttggtaaaagcatcatgccccaagtttaatgctgtcatcttatttgtatatgaaagggggcattagataattgggtggaagtatcagcattaatccattctcactatgagaaaaacatgctgctgatggtaaaatgcaagaagagtcttttgtaagttttaaggtttttttcagtaccatcacagtatcttatatataccaggaaatggaaaaaaagtctttgtataatgagtaaatacattgggcatgtatgtaggtatggcctgagcgtgtatgtataggcagatggtgagtccatcacgttatttcccatgctgtggctcactgtggttgtttgttttaatgaaagatgggctggattctcatgggataaaatgaaaatccaagcttgctcctaagaagcccagccaataaaagttcttgtaaagtcacttgagtgtgtttgaaacctaccacccaaagttttcaacttgtttgtaagaaaggaagctggcatttcacgtgtttatagagcaaattaccagcccaaacctcagatatgtcaaacatgttagccaaagttctttccaagagctctttcagcagagtataggctactgtatactttctaaaagactttggccttgaggtaaatgttacagatcatacaagcatgacatcagaacatactctcaaacaggaatttgcctgggagaaccttaaggactgagatgaaggaggaatgagaagaaacagaggtggatccacaccctgaaatagcaggtgtttttttctcttgtcaaacaatgatctggtctccgtgccgtcttcctctgcttgatgtacaagaagttaccaagatgctcccaagctttgtcccatgacagaactcctgaccattccaacatttagttgttgaatcttttggtgggggtgttcttaccttttttacagataagcaggggcccaatcagccccgagttgaaatcctcgatcagattttcatgggagtaatagatgtgtgtgaggcatggagggtcatcatgggtgggtccactgtcctcactgatactccattcataggtgtattctcggcctggagccacagcgtcgtccatcttctccgcagggaatgtgtggtcaaggtaagaagcacctggaggagtaacagccatcaagacatgtgggcagtttctgaggattgcgttttcaccactctcaaatctggggatagctaagatgagttctctggagatgcatatgtccttcaatagtgaacttttattatttggaaagattcacatatgcccatttctatgctcatgtacttacaaaggctttgataacatggtgatcttaagaataacaaatgttatttgtaaattaaagtttagcaagttaattttccagggtacctgaacaattattatttaaatataatcagagaattgaatcgcctttgattagtaaaccatctcagaatataagaatgggtgatatcttctttgtggtgtttaataagacatacttagcctattaacatgagatgggaggatagtcagagctgtttatgtattattttgttttgctatttcagatcttctttccaactgctgtgatcctcagctttgttttatctctttatttcatcttagccatctgattatctcaattttttcccccgagccacagcgtctaactcccctatgcaggctggttgtctgtatgaatatgaaatgtgtccatcccctgaaacttagatgtcttactttgtactttgtgcacccaaagacacatcattaacacctccatgtatattggactttccctactgataggagagggagaggatgaagaaattggtcttctttattgaagagaaggaactgagatactcaatattaaaagaagtgtagagggttgggtgaggttttcaataataaaatggagcaagtgaggtcaggaaggggagaggtgagtgccatagagagccaagtggaatgaacagtttcctctgcctgaggaattcctcatttaattaggtgaaagattccctatcatcagctggtgacagaatttctctttgggatgcagttatttttgtttggtacaataacttgataaattctttacgagaagaaggtgagaacatcagtgtggatgtaggcagacaacaaggatctggggaaaaaagcctgaaatgttttacatgatggggtaaaaggccaataaaactcctcttactgaagcaactacactttttgaaaactgaaatgattaatcctttccctccccttcctttctcttccctttcttttctttttcctttcctagtttcttttcttttctcctttcttcctttctttgtcttcttccttccctattccccaccctccttccctctctttcttcctttcattatcctcattgaggtataatttgcatataataacatttaccacttttaagtataatatttgctgagctttgattaaaacaattacccagtcttatagctatagttccaatcaagatagagaagagttccatcattccaaaacatttcttcatgccatttgtagccaatgccctctgggcccagacaaccactaatctgctttatttcactataatttggcttttctgtaatgtcatatcaatggaatcatcattacacacccttttgtgttggattagtgttagctggtatggtatataattttctatcctttattttttacctatctttgtctctctcattaaagtggatttcttaaattctgcatacagtttagcattgcttttttattcaatcttatttgtttcttaattgtagtgttctttccatttacttttaatgtaattgatgatatggttgaatttaaaactgccatctttatatttattttctatttgtctatctggtctttattccttttccccttcctttctgttttcttttggattgagtatagttagtgatgtttaatctccattgttgccttcttagctttgttttcttagtggtgcccttccgtttacaatatatagtacatttttaacttgtcacaaacttccttcaaataatattatactatttcacttgtaagaaccttgcaataatatatttccatttcttccctcccagcctttgtgctattgtcatacattttatttatatatacataatataccccacaataaattgttactattttgctttaacatttagataatcaattgcctttttaatagattaaaacgaggaaaaaatttctctatatttatcaacttctggaacttttcattccttcttatgaatctaaatgtctctctgacataatatttcttctatctaaaggagttcctttaacatttttttctgctctgttagtgagaaattctttctgcatttgtatgtctaaaacactctttattttgccttcatttaaaaaagactttttgacttggtatagaatactaaacagacagattcccctatcttctaccctcccaacactttaaagatgtccctaattgtcttctggtgtgcatagtttctaacgataagtctgctatcatttcttggttttgttcccctgtatgtggtgtgtgtttttatctctcactgcttccaatattttctctttatcactggtttccagcaacttgatagtgatgtggcttggtgtggttttcttcatgttccttcttcttagttttgtcaaacatcttgaatctgttggtttgtagtttacattacatttgggaatttttcagtcattatttcttcaaatactttttctgttcctgctacttctgggatccaattacacatatgttagatcacttgatatggtcccacagttcactgatgctctgttcactttcttcagcctttttaatctctgtatttcactttgcagtttctattgcaatgtattaatattttctactatttcctttcacagtgtctaatgtgctattaatttcatccagtgtttgttgtattagtggtatccttcagtttataatatatttttttatcctttattttttacctttcttttctatgctttattttttacttttcatgtcaacaattgtattcatctacagaagttctgtgtatgcatatttatattctctatcttcatcatgctcatgcttttctctgctttctggaacatattgagaagatttatgatagctgtcttactgtctctgcctgctgcttctattctctctttcacttctcaatctgttgagttttttcttggttatgagtcatctctttctgcttcttctaatgcttgtttatttttattaacattgtgaatttacattgttgtttgttgcattcttgttaactagtattgagttttattcacagttaagatacttgaaatcaaatcttgttttttattctgttgcctcctcagcagcctgtagtctaattttatccacccactgtttctaaatccttctgacaattctatccagtgctcatttattaggaggtctttctatgtttgatggtaggaacataaacgattaccggccctgagtaaggtccagggactgttccacctgttcctttcaagtgacatttttcttaccctcagtactttcctcacatgtatgtgcagatcagtattcaacttgacaaaacctctctgtagattctctagagctctttctctgtgattatactgtcctctgcaggactctgccctaaaatcacaaattctagccatttgagcttctccgaagtccaaactctatttcctcaacccatagagactctgtctgggttctccctgcttgtgctgttccctggaaacactcttcaagcagtaagcttaggtgctcatagggcacatctggtttgttactcttcttttactgtcttgagttgtctgtcattcgatgtctgaaaacttctgttttatatgttttgtctgcctgtctagttgttgagaaaaagggtaaatctggttccttatgttctgaagccaaagtctgagatgctaaatttccatataaaatatttttttacattacagcaatgtcagcttcccttctttaattgtacctttccccatcccaactgtggaaaatctattccactcaaaacgctttgcatgagtttgcatggcatcagcatatgtttggattctccaggtgggagtggaaaataaggcacatccattcaatagcaatgaaggattcaggtactacagtaacgtgcaatgtatctcatgaggttctgagcatggaaaccataagttgagtaggtatatctagatttacttcttgcataaagtccttaacgtggaccacaagtccatgtatgatttacctctacttctctcttcagtcttatcatacgtcttttctcttgtttactatgggctccttgtcccttgggtcccctgtcagttccccagacatccaagttctgtcctacctcagggtctttgcagatgccattccctctgcctagagtgctcttcctcccgtcttccttttgataaatatgtgctcatcattcagacatcaccttgaatatctgttcacttctacctttatctccaattctgatacacatttttttcttttacagcacccatcacaatttgtaattaaatgcctgtgagattatgtgactaattcattttcttctactagatcataagtatttgtgtcctgcacattttggtcacccaagtgtgagttcctcaaggaaaagtgctggattgtatttgtcttagtgtctctggtgccttccataggtacctagagaagcatggaacatgaacatgaagaagatgctcagtgaatatttattaaactcctaaaatttaaggtcctatgggctacagcctaggtcaacaagtcaaagctcatggctgtgtgttgttatgattgcgtaatgttaaaatagattaaatgccaacattaaacatccggagaaattatataagaatttggattactggtttctctttaaaaaacaaaaacctggagatctggttaacaacaggaccaaactcctgcacagaattttgttggatctggatcttagctgcccttttctgctttctgatgatcagttcttactggaccaattttgttcactgaactacttatctggctactataggcatctgagtttgtgaactttgcgctagcataaagtggactttgttgtgtcttcccccaacacaccccaaaggatagcttgacactaataactaatatttactctaggctgtactttcactttgataataaaactgtcaagagctgagaaatgataaaagcttaagtcacttcctgtaagttataacataattctagtctataaaagaaaaaaagtttatggagaaagtctccactaataagcaggaagcattatctgtgaaagattacaaaagagctttggtaacaaagcacaaacaggactgataaggagagttgccctctcaggtcagaacttgtctattaactgaaattagcatggctagttgatgagctgcaccatctaccttgaatcaagcatgacagcccttcttcaatgcttcttgctacatggcctcataaagttgaaaaatgatgtttctggacaggcagcttccactgtttcaactgttaaaacatcacatggggtttctatagtagaaaatgatattctttccactgccttcacaagctcccctaagggcaaaacattatattctttgcagggtaggagataacttttgaagttcttcctccctttatttttctgggtaaatgtgtgctcattcttcagatgtcagatcaaatatcatcttacacccttcttgatctctgattgtgatacctgtttgtttgttgttggttttttgacagcactcatcgccatttgtaattcagtatttgtgagactatatggttaacgatacttttttctgctagatagtgggagaaagcacttgaacttcagggtcagagttgaaaatatcttggtggttgtatcatttgctaactgtgggaacttgggaaggtttcttgaagtccctttaacctcagttttttcatttataatttaagataatataatcctttttctagagataactttatcctttttgatgggttatgaagactggaaaatatttgtaaaatttctggctcctaacaaatgctctgatagcctgtgggaatacatgttcacattttggttaagtattttctttcccagtcatgttgcaattaatacagcctctttcctttatgttctactttagataagatagatcttaagtgtgcttgagttctggtaacacatgtgagtaagatagaaattggtgattttcttagtttgggttgctgttaacaaagtaccctggattgagtggcttataaacaacggacacttcttcctcacagttctggaggctggaagtttaaaatcagggtgccagcatggttgggttctggtgcagggtctcttccaggttgtagactgccatcttctccttgtatcctcacatggtagaaagagggtgagtgagagggtcccttttataagggcactaatctcatcatgagggctccatcctcattacctaaaaatctcccaaaggaggggggagggatagcattgggagatatacctaatgctagatgacgagttagtgggtgcagcgcaccagcatggcacatgtatacatatgtaactaacctgcacaatgtgcacatgtaccctaaaacttaaagtataataaaaaaaaatctcccaaaggccccacctgctaatgccatcacactggaggttagatttcagtatgtgaatttttggaggacacaaacttccaatccattgtagtgatgtatctattccaaaggcgatgaaagtaaataagacttttttggtaaaagtactttttttttttttttttggtaataagtaagacaaagtacctgctcaaaattatcagcaaaatcaataattttaaagcaagggaaaaataatgcatagtccttactttctaatcagtcctcggcccctcagtttagttcagtaatgattaatatcatcatgatcatgaccatcatcatccactaggttccaggctctgtgctaaatgccagagtacaaatgtaaagaagacagggcctgggcccctgaggggctctgcctagttaactctagggtacatgttggtgccctaattgtgataggtttgacctctagatttcttctagggctacaattagaacacactgtcaatctggaatgagaaccaaccaatgtaagtatctaaaaattgcccaagatgctataacacttgtgctaggtatagcagggtgactgattttctaacaatattgaacctatctgtaaacaatcaatgtttcacacctagatttattttaacacatactgggcttaaaaaattattgtatatacttgtgtacatgatattttgagatagataatgaaaggttactctagtcacacaaattaatgtctgtctaattgatcaaactaaattactcagaatttcacattcgcctgtcagttacatataagatgaatttcaaataattaaatgaatgatgttaattaagtttagtatactactaaaagttgaattatgagcatcttgaaacagtgaatgatatagacttgtacataggatatattctataattacactgagtgagatggctaatgagacaattggggtgtaattttatcaatgcttttattcttttcacttcaaattattttacctttagtctagaataaaacaggtttgttgtatctttgattttacaacatacattaatataaagtataaaatacaaacagctattaagaggaagcatttgtgagatgcagttttggtgaatgtgattttgactttgtaatcaaaataaaaaaaattaagctctaaactgaaaagaagagaaatggacagggacaactattgtgctagagcacaagaagtccttgttcagctgcttgctggaataaaatctttacacaagggtagctcttcatttatatttactcagttctgttcatttcctgctcagtcgatagtcagctttgtattgtatttattcttgtcatgatgtactaattacttgccaaaggctctcagtattttttaaaaatgaaaaatggtgcatacaagctttgggaaagtgaagttacataaagagcctttttggttactcattagggtgctcactcagtaactcttcccttgttacttatttttgtgaacaactcttttcctctcctaagttaataaacttagtgaatgcttcactacattcaaagattcagaatattcttttagaagctataatgtaggcaatgggcgaatcaatgctgacgttttataaagagctgatttcattgcacaggacttgcaagtctctttggaaaagggatccacatttttgtgatttattaaatatacaaactatagccgttatagtttgtttcaggtgtttatcatatactcaaggaagtctctacataaggccaaaatattcagatgagaagtgaaaaaatgtaatcacctacattaagtcaagcattggaatgttttggaaaaatctagaagagcaaatttttgtatagagaatttggcaacacttagatacaacgaacaatgtctggcagaaaacgtgttttatttggagagctggcttaccagcagatggctatatattatagaactaattttgtgacatcacattcatatgcaactcatatatttaaaatatgagaatataactaaaagaaaagaataatattaaattctccatgaaacaagctttttaaaggtaattgaccaaaacgactttgaaaattttactgaacaacaaactttgctcaaaggtgcagcattgaagtcaatttgatgcatgctagttacagagtttctgaaaatttaacctcaaattgaaaccctttagtgacagcttttaagtgattagttacagttgcagatactttattccctgatctaagacagtcttattaaatacattattaaaggaaatgtccttacaagcatttttacaaatcaccgtttgtccattctgtcaaaaagggttatccagagttctcttatgttctgttgtggtttctcaagccagtgtaatactatcttaaccccctaccacctatctctcaaatatctacctctgagatagaggaatctggattctcatgtaactggctcagcatgcagttagtttatccccactcccaaaaaaatagctcaaaccacagagggaggctataggtgagggtgagtgtcagacatggaggaggagatgttttattttaatgcagagggcataataaaatcaacttataaggcttgtcttttaccataaaagatactatctgcttactaggtttgcatctcatttccaaggtaaaattttactttccctaccaatatgtatttacctttcttagattcataggaccagaggcaatattatatgccaataatcatgtctccagtgaaagctgtgggagcattttaagcaattgctcataaataattgctggctgtagggaatgtagggacaaataaacagtaaaggaagagggatagtgttgcaaggttcattcactgtgcaaacagcccaggtagggtccaaagtctacaattcttacctcctcccttatttgaaatgaaacctgcatgtgacattttgatattttgaggtttctcccccttcttctttacattgctgaacttctgatgcagtcgtctagaagcctcataagtaggtgaagtggttgttcactatgtcactgtatgattttaagaacataggagaaactcctgttcccactacctcacccagagtcttgccaaattcactttggaagaaatctcagtgccacagttaatgcttcattgtttttcctcaagccaaagattaagtgctaatgcaagtactcctaaggaaggtagttcattgacctattatcagtcacttataccttagtgggtatgagtttgacaacagtttatatagaaaacaataaatttaaaaattactttctgattttttctgaaactaacaagttttaagataaatactaaattatttgaacacattttaattgaagaattatctttactatcatggctaatatttattatctgttatatgccagtcattattctaagatttcacgacaacaaacctgtatgacagagacatgattattattaccattttacagatgagaaagatgaggcacacagaggttaaataacttcataaaagtcactgagccaggatttgcacttattagtctagttctaaaacctgcacataaaccactctcctactcaattattctctcaaaggtatgatggctggaacatgtagaaggaaagatatttaaatgtgaaccatgaaaagtctgaaattattttaaaatgttctcataccaacaactattataatatggatacaattttttataccagtgcctgatggaactctactatgcttacaatgatctgaacatcagcataatgggataattagaaccatattaacatcaggtacttactattcagcggctgatacaataacttgcatgactattatctttatgattattgccatcattgtcatcattatttatagagagcttatccgatcccaggaaccatgtttagtactctacctaagtgacttcatttaaatttcaggcaatcttatgggtggttataatcatttccattttatagatgagaaaactgaggctcagagatgctaaagtcgtagaatcagaaatgataaagctagaattttaacttgtctgcctttaaagcttactttcttaaccacttcactatgtccaaaagtctaatactattaatgcttctagtctcaccaccaccaaataccacttattgagtgtcatctatgtgccaggaagcctatatcaggctagttctatgtcactatgtcagtggctcatgggccaaacccaaccaatttcctgtttttgtaaataaaattgtattgtcagaggcggtcttactctggtgtatgacttgagggaaagaatacggtaacaaagttaattagttctggcatctgtaaccaaagccaaaaaaataggtatcgtctatggctgcttttgtactaaaaggcagagttgagtacttgcaacagagatcttatggcctgcaaagccaaacaaacttactatctggccctttacggaaaaatttactgacccccgccttaaaccatctttcaatgtatgtattattattcccattttaagatgaacatatgagaattcagagaaattagataacttgccctcccaaacattaaagagtaagaacccagtgaaaaatgcaggtctagaggactccaaaaccttttccttttcttctctcaaaacttacaacagcaacaatttttataattaccagttgcaagagatttccctaacaacacgtggttaacagtatagttttaaatgttgatgctggtattaaagacttagacattttcccttttcagaaaaatattagatttatcttaccttctgataatttactgtacctaattccttgaggatggatgctcaagggcttatctgccttatttttaaagtgaacttttatgatgtctccgacttcagcatataaagtaggcccaagaagtcctgtgaaaacaaatatttaaactatgtctgtattcagggtcatcaaaggcagagttgctaagcaagaaaaacaaacagatgataccaagagtgattgctaccattcctcctggtcctgaggctgactcacttattttcaatctagaaggttttagcagctcattaactcaacattacatgtacacagatcacaatagaatggtagaaacacttgtcctggacccaaaagaagtcaacagagtaggagaaatagttctggccaagtcttgcccactttgacccactgtcattccttagcaataactttctttgcttaagaaagatgttcatttcaattacagagggtgatgcgagagggtagttactttagatttctctgacatgggtgtgctcagagacctagatgaattgaggaaccaaatcacacagctctctggctctgaggcaggagtagtcttgatgtatctaaggaacagtaagaaaaacagtacgggaagaaagaagagatgaggtggatggtaggtgtgtagaacaagggaggccctatgggctacggtaagaacttgaattttcttctaagtgaaatgggacatcactggagcatttttctttttttttttgagatggagtctcgctctgtctcctaggctggagtgcagtgatgcaatctcaggacccactgcaacctccgcctcctgggttcaagcaattctcctacctcaacctcccaagtagctgggattgcaggcatgcaccaccacacccagctaatttttgtatttttagtagagatgacttttcaccatgttggccaggctggtctcaaactcctgacctcaggtgatacacccgcctcagcctcccaaagtgctgggattacaggtgtgagccaccacgcctcgtctaagtgaaatggagcatttctaagtaaaatgaaaaaccactttgtacagcagagacatagtataacgtgtattaaaagttcatcctaaaacaaaaagttcatcatagctgctgtgtagagaatagtctgtgtagggacaagaatggaagcagagagattaggcagtataggaaagagactgcagtgtactgggccagcacatgtagcagaacgtgatgagtagtggttggagtctggacatttttgtaggtaaggcaaacaagacttgctgatggattgcatgtggcttgtgagagacagaagtcaaggatgacctcaaggtgttttatcagaacaactgggtaaatgatgttattagttactgcaatgggagaacacagcagagacaggaggttatgggtgcagaaatcaagaatgaggttttactttctacatgccaggcactgtgttagaaagtttctggctacctggatcaaatacagtccctgtactgaaggaactcacaagctagtttggagatagatgtatgataggagcgactgctgagatatgggcaaaatattacagaagaagagaggatgaagcacaaattctgtctggggagttagggaaaaagttgatggctgagtcagaatttgaggaattgtatatagtcagccctccatgaccatggttcatattcatggttacacatccatggagtcaaccaattttggatcaaaaatattcaaaaaacaacaataaaaaataaacaataaaaacaatacaaataaaactctaacataatagcaatttacatagtatttacattgcattcagtattataactaatttaaagatgatttaaagtatatgagaggatgtgcataggttattgcaaatactatgaaattttatataagggacttgagcatctgcaaattttggtatctgtgagtagtcctggaaccaataccctgtggataccaagggatgactgtactagaatttccaaagtgtagtccttggagtctctgcatcagaatcacctagggtcttaataagaggcagatttccaaatatcacctcagcctcaatgaatctgagttctggaggtgaaacttgggaatctggactttaacgtgtgctccttggtgatcttgatgtctttgaaatcttgagaatctatgaccaaaagccccattccagacaagtgacagaaatcaactactgtcatttctgagccatccacaagtgtcatgggattggcttctcgccattaggcgtcctagaagcaggagaaggaagtcacggcactcatggagttcagccagcatttgtttgcagtggtgatgataatcataataaggctttcctgtactgtttcccttaatacattcaagcactgtaagtccctacattaatcctcacaagtttttaaggtagatattaagatcctcattttataggtgaggacactgagcctcagagagtttaaatatcttgcctaatatcacacagcatcatgatttaaagtttaatatgtctgtctctagatcgtgacttttaagccacttctttatactacacctccaccttgtattcattcctttattcattcctttatttattcaatgaatatcaagtgcctatattatcctaggcatcagaattgcaatggtgcgtaaaagagtaaaatagatacacccactccctgccttcatagagtttataaaagtcaaacatttttatagttctataactttatacgtttttatagtaggaaagacagattttaaacaaatgatcacaaaaacattcaatttaaacctatggtaaatattatgacagaaaaggagggaatactctgaagagtatttgacagtggaatctagtccaattggaggtgagttggggaatcccttcccgaggaattaatcctttaactgaggtccaaaggcagagaggaaaagggatggccaaagacattctaaaaagttagagtagcgtgcgcaaaggccctgaggtgccagaaaatgtggcctttttagagaactgacagttatccagtggggaggtggagcttagtatgtgaaaggaaggggcagaaggtgaagccgaaggcatcctcagagtcccatcatgcagggctttgtaagcctcatagagttttccctttagcctaagagtatctggaagccattaaagagttttcatcaggggtgcaacatggaccagattttggttttaaaatctctggctgtatttgtggaggatgatctcggaggagactgagcagagaacaattgagagaacagatagaagactccaggagagatggtggtgactgagattatgatgagatgatgaggagagaatatattagtgatgtatttatgagataaaatagttggaacttgaagatggattggatgtggggtagagaataaaggacatcagttgctgtggatggctgatgaggttctgatttggggagctgggtggaggagggtgccattctctgagatggaggacaccgtgggagggctttgtttggtgggtgtagtaggcagaataatgtgcccctgctgagatgtccacgtcctaatctctgggacctggaaatatgctactttatatggcaaaagggactgtgtatctatgattaagaatcttgagatgagattcttctgggctgtccaggtggatcccatgtaataacaaaggtccttatcagagggatgcaggagaatctgagttaggaagagcttggaagatgctactcagctggttttgaagatggaggaaggggccatgagcccgtgagtgtaggcagcttccagtaactggaaaagacaaggaaacaattctcccccagagcctccagaaggaatgcagctctgccaacaccttgattttagcccaataaaacccattttggacttctcatctgcagatatataatcataaaagaataaatttgtgttgttttagccactaagtttgcagtaactggttacagaagcaatggtaaactctgatttctgggacagaggtcctatctttccctacccctgtcttgccacccacggttgtcctattcctttccttgaactcctactcctggagtttattctgatcttgtgcctgaagctttttgtttgtttttatgttagctttacacaggactgtggaggtcacaaagttcagtccttattttagttaacaaagcctgggaggtaggaatcgggggacaaaggtgacttgcccaaggtcagtcagtgatctggtagcattgctgggatcagaactcagatctctggactcctgagccaaagctctccctattccttccacggggcaggctcaggcccccatctttatagaatagtccagatgtctacacctcttttgactcctgacatgtcggactccactgactgacccccctcttccagctgctaccctctgtcttggctcctgatggaagtttccactgactattcccacctaccccagctgccaatgagcccaacagggtgctgactatgctgccaattgtgtgccgcatttagttgccatggttctcttgcttggttgatttgtttgttggcatcacatgcctgcaaataccagatgcccagagaaagtctcctaagttatttaacctaataagacctattacttcagtggacagtttggagtatttattcaacctcccctcctgcttcttcagatttaaggcaaaacaaaaggatgttttcataaatgcataccaaatactttcacgcatgtaggaaaacacatggctaaatggttttcaagctgctctttagctcctccaacagccagatggcctaaaacccttctaaccctctcctcagtgcccaaagctggattggggaaaggagtggcctacttcagggcttggggaagccagcacagcatgtacccaatttagtgcagttgtggaactggaaaggactgcagaaggtcaactaatccaatcccctgctcttaggtgaacaatgcattacataacacaaggtagtgattgttgcagctatttcaaaactccttcagggacaaacattttataatttgtccctgaaaaatatgcagactcaaaactagccaatttaattaattatttatttatttagagatgaggtcttattttgtcacccaggctggagtgcagtggtgtgatcataactcactgcagcctccaactcctgggctcaagtgatgctcttgtcctaaatgaccctcttgccttagcctccccagtagctgaaatgacaggtatgtaccaccatgtctggctaatttaaatatatatatatatatatatatatatatatatatatatatatatgtatgtatttttttaaatagaaacagagtctcactacattgcccaggctggtctaaaactcctggcctcaagcaatcctcccaccttggcctcccaaagtgctgggattacagtcatgagccactatgcccagccaagactagccattttaaagcccaagacagaattcctaaaaatgaccccagctgtactccctcacctgcccaaatgtccacaaaccttattggatgggcatcttcatacctccaatcctacagcccagccccctacaattacaagaactaacaacaacaatagttcatgctgcaggagtgaggctcatgactttttcagggctcagctagaatcacacccagcagatgagtggagcaggacataggggaaaggtacaaataacacaggactagtctggggaatgggagaggccacatagttaatggcagtgttcaaatccagatcttctcagtcaaaataaaaggcttttccttcacgccagatttgcctccttgtatcaactactatagagttacaaaggtgaataagataccactcctgcacttcataagttcatagttaagcaactttggacattcaggaagagattacattaaaatggacgtcgaaacacctttgtccacatgaaacaaatatattctgagatacacaggggttgacagaaaggtgcaaaggccttacacataaattggagactgttctcaccaactgtcagagtctacctctaacaaggttaaatcaggaaatcactaaaaaatttaatcatctgaaaggactttgatcacagaacccttttcttcaaaagctatccatgcctttttattgtttaaaagtcttcagcctggaattagtcctttccgtctcttatggcatttagcacaatgtctcacacagcaaagggattaaaatttgcttagcttggcaaaagccacaaaaggtacaccttcaaataccggccccaatcctcttttcctggccctaatgagtatgtttcccaccttatattcccttcatctacctacaatttaatttaattaaatagttcttaagtatctattgtacatgctaagcttggagctggagctatgaaaatgaatagactctgtgatataggacaggacatccttcaacttcctactcataactacaaacttaattttatttgcaacgttatcctctgctttcctggccccccatgaaggtggtagccattctacctaaggccaagccagcccaaggtttgaatcccaatgcttcctgcttcttctaagtctccattaatcattctctctcagatgttttatccccacattttctattggaaaggacttcatggcatttctatagagtcttcccttaaatatttaagtctctgtattcctttttataaaattctcaaatgtccttaagctcctcagtacccacccccacccccgaaactaccctgtctctcctcccatctggaaccaagtttcagggaagagttatctataagacccttgtgcttcagtttcctcgccttccattcactcctcaacaccctgccatctggtcttgtcccactattccataacaaagggaccatattttgacccttatattaatagcatttgaccctttgcctccaggataacacattctctagatttcttctcccctccctgaacaggctttctcaagctccttggtaaacttttctttcttggctcatcccttggactttgctgctactttgagctctgtctgcagccttctcttctcatcacatcctccctgggtgagttcacaccctctaaattcttcatttgccatctttgttctgatgtctcccaaatgttgacagctagctcagatctctcttttgagggccaaacttctacacccgtctgctcacttaacatctctaggtagatattctatacacacctcagactccaaatctatacttatcaccttctctcacaaactatctccttttcttacattttctttctcactgaatggcaccctatccattctgctgttcaaaccagacaccttgaagtccataacaattcccttttcttcctcattatctgcatctaatgagtcaccaagtttaatcaactttagctcctaaatatctttggactccatctcagcttctctgctatctggattgatacaacagtcccatgactactttctctggctctggactggtctttctccaatctattctctataattggacaacataatctttctaaaggacaaatatttctcctgctgaaatccttttagggactccctattcctctcaatataaagcctagcatggatccctgatccccatctagttgcatctcttgttaattccttccctgaagtttgtggtccaactgtgctgatccagttatggttccacaaatataccatactctcacctccaaacttttaaacattctgtgccttggtttaaaatgcatctatcacccaaccccttgcctccccacttggctttccaagatcctactcttttttcagctatcaatctagaaatagaaatactttcctgaccaccagactggagataggtctcctatgtcctactacagaatcctcatcatagttcttccttattactctactgtcattgcttgtctatccataggttatccccaatagctgattggctcctggaaatcaaggtccatgtcttattcactttatcccagagcctagaatgtagtaggttctcaatatacttttttgttgttgttgttgttgtttttttttttttgagatagagtttcgctctgtcacccaggttggagtgaagtgatgcgatgtcagctcactgcagcctccacctcctgggttcaagtgattctcatgtctcagcctcctgagtagctgggactacaggcatgtaccatcatgcacaactaatttttgtattttcagtagaggcggggtttcaccatgtgggccaggctggtctggaactcctgacctcaagtgatccatctgccttggcctcccaaagtgcatgagccaccacgcctggcctcaatacacaattatttaaaaataaaagaatatttaaatgcagatctgtttaaaattaaataaatatataaatgaacacatgtgaagactatataaatgagtggagaaatatagatatatagatatccataatactatgatatatatgatctaagttatgattagtaatagcagcaacaataacaataatgtagctaacttctactgagtgcctattatgtgtcagcatcattataaatactttgtacttattaactcaattgatcctcttaatatctttagaaggtagggattaattcaaggtactggggatgtatagaagagggaagatttaattctgctggtattgagggggtgtcaatgtagcttcagagggaaagtggcttctgggtaggtagtagtgaaagccttggttttgggtgagattcgaaccctggggaagaatatctggtggggatactgagcaggagtggtaagagaagtctgagaaaaccaaggggaagtggcactagaaaaaacaggtaaagcgagagcttcagaaaggaagagtgttaaatgtcctagtaatgtctagtagtaaaagaacataggctctggcacctcaagtcctaggtgcccttttgtgagagtaattttagtagacttattcatactaaagcagattagggaaggaatataggcgaagaaatgtagagaatgatacagagttctcatacagaaaactggtagtgaaggaaaggagagaaaaggaaaaggcaggcagggtcaaggggagatttttttttttctttttctagataggagttaactggacatggtttgatttggttttggtttagtcgttgatttttaactgaaaggaagactcccattgactaaatattgaagattaaaggagatcagaagaggcaggacagactaggatgattctgggaaagacagcaggtcttcatctgattggggaaagggacaggtgaattactgacaaggggattcaactggaggaagttctcccttgatggtctctatcatccctgcggaatatggtatcatagttaagatattagaaccctattcaacccagtcttcttgataaaggaagagatgaggaaaaaataagagattttctttaaaaattatggctattgtatatatcacactaaataaacagaagaatagacgggaaagagatgcaaaagagtcagccatacatagttcctttgaatgaatctagggagccaaatggaagcaaaatatcattttgcgaaggcacatctatgctcattaaactagaccataatctccatgaacccaggatatgagactgtcttgtccactattgcatccacaatgcctatttcaatgcccagcccataccaggtactcaataacagttttttagatgaatgaataaaaattcaaacacttataagttttatttagttattttaatcaaggttaaaaacagagccagcttcatgggtatgtgacctgggcagtttcacagggccccatgccccaaagggcccctggcttggtttaatgctttgcagtcactgtgaaattttcaataatatgaacaaggggactcacattttcattttgcactgggccccacatattatgtagccagtacttcttaaaaaaaaaaccacacgtttctataaattttcagtaaatggatattttagatgcatgtgaatgccaaattacccatagaaatttatctttaaaattaaaaaagtatatttcaggcttacctgaaatggtagattgtggtttttctttcttaaaatatggttcatactctctgtagacaattttcttaaaggaagttacagaaagattcaaactggaaataaaatacaaaaactaatttgaaaggcatattcaatatctatttctcacattacaaaaaaagtagatctctcatatcttcagacttctagtagaataccagtatctttattgtatttcagaagtccacagttttataaatatgatcaataagtaaagttaatgaaataattattggtctcttcaaaaatatcctgttgtgataactatttgttcacaagttaatctaccctaatatcattcctcagaatcaattttctaaaaagaacccaatatcacagtagaaacccaaactgtaggtttagattttatatgattaaaatatgaccaaatcctttatgaataaatatatgagctgtttttcaactgatcaatcaaatatagttttaatctactggggaacattgtgaaaaagtattgatttggtggaatttatttctagttgagaggtgagagatggctaatggggtaaaagccctgggattcatattggaaacaaacaaatgaaaaaactgttttggaaagagtcagtaacttgtccaagagatacagttgataagtggcagaaccaagattaaaaaatgtgaaaccactgcattcatgattttaaataaaattagagagaggacagacaacagggagagttgtgagtggtgggttactttcctgtttttgctgttgttgttattgttctgtacctctaaaggcaaatcagtcttatccttgtcttaaactcaaagatgagggtaaaaggaaagagaatttggagaaaataccttgcaaatgtctaaatcagttgatcagagtggctttgttttgcttcctaatgtggggacagtggcccagccataatcaagacataacagcacccacatatgccatgacttctatacagcgcggtggctagggtgcaggctgtgaattcagtatctctggacttgaagcctatatctacctcttattgttttactttgaaaagtttacttcatccatttgtgcctcagtttctacaactatgaaatgagattaatactgaaatctccttcacagaattgttgtataattttaaataagttgatatgtgcaaaaggcatagagctggcacactagaaatactcaatccatgttagctagtaatattattttgtaaatgtaataagagttagtctttacccttcaggttttctcagaaagcaaaaacaaatctgtagttacagtaatgctcacaaattgtaatatgtggaatacagaaactgtgttaatatgtgggggcagaattaaaggaggcacgtaagtacttttagaatagctagatagagaaggtagtggattctccatcactggaagcattcaagtagaaattagacaactacttggtaaggtcattggtgctgagggaaaggggaaaagtagaaggttaaagcgtggaagttgaatatgaattaaatgaactcttagcattcttctaacttaagaattccaggattctatatactaatgtccctaatgtggaagtccatttttatttatttatttttagtacaattgaaaagttattgtcctcccctgccccagatctttaatacagaaatgtagatgatggtgtaaaatctttactaaaaaatatcagtctcttacgtggagtaatttcaacagagagatgtttcctaacatgtttttactatgtatgctgtgtattcatactgaggtatgtctattttgatctgaacaatttctattggaaaataatctatctgattaaaaagttacagatcatatgaattcaaacaatgtgtacgacgagtttttcatttataaggattgtttaaagatgatttgttcataatcacaaaatcatataaagctagaaccctagaaggaaaatgtatgtatatcttttcttcaatatctctttgtatacatgtgagtgactaaacaagttttctaaggaaatttttgaaagtgttcaccttagacttggagcaagaataatagatacattttacctttaaaaggcattgtcctgctaatattatatgaaataagtagatagatgtctgctttgtgctaaaatacactttgccaaaagatggagttggctatgttgatattcacctagtgagtatcatagctctaggggcaggacaagttagaacaagttcttagtttaagcagccagatatatggattagatttttcataagaaaatgctagagagaaatgatatgatttagggttaaacaatatgacagtttgtctgggttgtgtttctatggttttgactcaacaattcctaccagaggaacgaatctccagaactttggaaacttacccacaggatgaggggacagaatgaccagtcatggttccctgtgtactcaccatgtgaatcagacctttgccctatctggttctgcctccggtattttgcttgttattttcaacgctaactacagacaagagaaaaaactcccaagcatgaacccagcatgctacaagaaagccaacaaccaagtctgcattctactcatgagcaggcaagattagtgttagaaggactgttattttccttggggttttagcttacggcagttcccaaagggtgtgggtgtgacctagattatcactttgaagtacgatatttaaaatgattatttttgagaaggagggatctcttcttattataagaccaagatggtatgtaataccctccaaaataacccagttacaatgagagttttaaaaaggttaatattatacactaaaagatctcaaaatattacattattttttggcagattactttggttttgtaattgtaaaagaggaacacatctttcataatgaagtgtgatgtaaggaaaaaaagtgagtcacactagcaggtttaccatttaaaaaataactaactggaaatattgaatagactgtatgatttagttaatttctgagaagtcttatttttaacatttcaattagaaaaaatagtttgcaactcaaggatagtattttatctgaattaaacctcctctcagttacatatgcctttaagtagccaaggtaaaccatatcccaggacatgatgaacagagagaaaaaaaaatgaagagtcacattcaataggataaataagtcaaatatgaagcagaaaaaaggtgaaagtacaaaaacatacaagaactgatgatattttgaaagtcatttataaggcagcaataaaattatatgacaaaaagcacaaggtgttcatttttagttttagaagatgaagctatgtagacaatggaataaataatatgtaactaggagtctcataaaaatactatacaactaaaaatctggaacaggagtttgcaggaagggctaatgagggagcaagtgcctggtgcctttgaattaaccaatatataagccaacacaaacatactaacaaaactgtattgaaaataaacttgaaaagaaggtagcatctaaccaatcaaatagggtgctttctaaaccctcagaatgataaactacattgttggatgcaaaattagcatttgcccagtttatttaattcagtatactctcctattagttatatttacttacctgaagttaaaaaaaaaaaaagccatgacattgcaaagggaatgttctctaaaagaaatagattttcctctctagagaagcccacccggactccacacctgagttaccttgagtttgtgggctcaggtcggtagctccaactgatgccctgagcagccacgtagaactgccttagctgtgccgcttctgtcccttggctcccccagcctacccagctggtgcccaagaccaccaggacccagaggcgtgggcagcctgggaacatgcttcctttcctgctcccgctggctgccaccaccccaggacctgggcagcgcttgccgagctgctaaccacactccgggctgtcccagctgcaatgagctctagaggctgtgggtggcagcgtcctcctcccctgcagttcttgcaaacggcagcagcagcctctggctctcactccctccgctttttctggggcttttcctggcaggggtttggtgagatcacagctcccagtgaccagaggtattagggagagcaaccaaactagtgactgttttactgcaggtgaagaaggggcagagatcagaggctctagcaggcgggacaatgcccagggattcatgagccggacaaagctgtatccctccatttccacctgccaacaccacggaagcagtcgtccgttaccactgacctgaggcctgcctgggtccaagctcacacttggagaaccttctgtgcagtgcagtggcacccaaccaccttaagcagatggctccccttttaatctgaggaaaagagtattgtgccctgttactgggcactgaaacactattttcaagtggtgaagaagcagggaacaaacacatggacaaggcctactgctctgaatcgccttcctggcctctatcaaggcacagttctgccttgataagggcctgtcgccagctaagctgcagcatagcagcgggcttgaagagcttggctgaaaaaaatcagttgtccagatttcagtttcacttactagctgtgttgtcttgggcaagttactgtacctctctgttcagttttgacatctgtgaaataaggatgacaataataatttttcctgatagggtatgttgggaggataaaatgctactgtaaactatagttccagcacttaacacacagaggctaggcgcagtggctcacgcctgtaatcccagtactttgggaggccaaggcgggtgaatcacctgaggtcaggagttcaagaccagcctggccaacatggtgaaacccttctctactaaaaatataaaaaattagccgggcgttgtggtggacacctgtaatcccacctactcgagagattgaggcaagagaattgcttgaacctggaaggtggagtttgcagtgagctgatatcatgccattttactccagcctgggcaacgagagcaaaactccatcaaaaaaaaaaaagaaagaaagaaaaagaaagaaagagaaaaagagagaaagaaggaatcacaaatttattattatgatcatattttcctgtctccaggaccccttgtattcttgtttttcttgaaggatctgactgtttcacagcaccttaaatcttactttgctattgatagagaatctgcgaattatattgtctgaggcatcataatgacttgtcctgggttccctgtatctgcatggctccaggtttctgtcttatgctttatgcattcagtacattcaataaattgtaatctggcacctcacatgaggtctctgttaatgatatcaggctcatcaacagcctcttcctccctccccactccccccaatattctgtcttttctcctgtgctgatattattgcaccaacttagaatgcccattttcttcctctttgctgggccattctttacagtccagagttctgcctatctcccagattctgggctcaaattggcttttccattttatgaactattacaacactattcaaattatataatcatgttaattaccttttgttattccatgcaggtatctattgtctccctaactgaacagttgcttacacttctttatctacaatattatcagtgtctcccaaagttggcagaccatcagaattcccaggggaacttttacaaaatgtagattctgactcaggaaacagggttgagaccaaagtcctagaacacctagcctactgattgacatttaaataagcagtcagagatgctactggcagtgtatcagagaaacgttttgaaagcactgtgtccctaaatcccaaggttactaccagaattgttgcaacattattgtaacctttgagtaggctgcttttttatttgcatgtttgcttatgtatatacagtgtacatgacatatttatttaattacattttacagagacaagatgactactataatttttggctctctattttttttaacatcagttccagataaatactatataactttcaatgacctatttattaaacatgggatttaaagaacatgtaaaacacatttgttcttccctgtaaaatattaaggtgatgaagaatttttccatttctctgattttctcttgcagtgtagggtgtgcgatacatatttgctgactgaatgaatggttgaggtgtaaataggacaaccataattgtgtgttattacactgatggtaaacaatgtgatgtatacagaccttactgaacaaaccataaaatagaggaacacggcatttggggaaaattcttttaattacgcatttgaatattggtctttgggtcatttgagggacagtgactggtggcaggaaggtccacggtgacatgtggccttctagcttgattcttggccttctgcagcctctggtgccatccagaggactctctggaagcctcagagcagaggtccaagaggcctcatcaacagcaaccactggagactccagaagatgctacaggaatttcttccaattagagatgccacctgctttccaacaaagtggagaaaaccttccttcaatcaaaaaataaagaggtatttttatttctccacagtctggtcttcttgtgagtcagatgctccagtctctttggttcactggtatttcaagtaacaggtgagtcaaagcacagagactactgcagaaacatttgctcctggcttctgtggcttgtgttacaggaagagaagaggtgggacaggaaggggtggtaggttgagaatttgagattgtaccacaatcccaaactcaggaaacagggttggtccagagcgggtccaacaggctggtccagagctaatctaaggtaattccatgtctttgattcatgggtgtttatggaaacctgcagcaaatgcattatagttaagtccagtgtagcaggaaacttgatgttcacaacaggatcatatggaggctgaatgaggagaccaggaaaaggacaggtctctggaaatgagaccaaagaaatttaaataattatcatttccttaaaaaaataaaagaaagaaaaaaattgctcatcatatctacaccctgaggcgcagcataatcttttctttctagatttcgaatattctgccattcaggctttttgtaggacactcaactacccactttttgggagagggatagcatcagattatttttgtttttccagcaggtagcatagggaattgactccataacagttcgtaaacatttttcagcagtcctgacttctgctttgcaggcaaggccacatcatcaccacctagcagttaataatggaaatgttacacatcctgaaataagttatgtcttgttaggacatttctgtcctggaggaaatgaaaatccttttgtgaactcttttgtaactccattgtcatacctgtgtcctactgccaacacaatttccttcatgcctgaaaatttaatacatacttaaaatttaatatatgattatgtaaagaaaagttaagctttatagtcttccatttttccctagtgttctatttccttcaaaaatatctttatagggatcttaccttaaggactcgggtcaaatgcagcgtttgtaaaaactccatatgttcctaggtggctaaagaacagaaacacaaggatggcaacaatatactgcttagttctcgacaacacagtccaacacatagtatttccagaaaccacaaattaccatccacccttggaattctgctttagaaaggaaagaaaaataaatgccaaagaaatattcgatatcccacttaccagctctgggtaatttgcattgcattttgcacccacactaagttattgttcatgctttatgtactgaatacctgttataccctctaagttgctgcaacctcttctaggtgacaagaggtagttacaaaattcttggcattaacacttgataatctaacgatagttttcaaagggtgcaatatgacccctaggggtgttttttgatttttataaccaagagttcttccgatattgagtgggtatggggcaagggtgctggatgtctacgacaatagagttcatataaggatttccatgtcctccaggacggaaatgtctttaaaagatatccagcacccctgcctcctgcccactcaatgtcagtagaactcttgttcattacaaaaataaaaaaatacccttgggggcatactgtccctttttgaaaactattgctagattataaatagcaaggggtacaggacacaaaagaattgtccaacatcccacataactttggaatatctgctcgatattcatacaggttaaaaatctctgagcctggaactcaagcactttacatgtaaatattaagcatttttttgcatctttaaaatgcaattgccatatgaatcaaaggacaattatcacaggttttcagactctttaccggagttgttcaccatgttgaaaaattaggctggtgttggccacagttctaatgctctttgagtcactaatacaacattcccccatcagtccacctgcgtgggcgttgctttcctagtgattctgtggaaggtgcacgcttctgatgacctcattgcatctactggcacagcgcctaagtttttgcatcttgtttttattataaattacttttcattttattcctactttatattttaattagaatatttgttatctgtgtattttacttcagagtagaaaagaagacattgcaaaagacattgtaaaaaggaggcaggcattgcatgtaatcattctgacatattacagtgaattataaagttaaggtagcaaaatttactcaatcataaaacatttctaccttacctgtgaggattcaaggggcatttcccatcatctaaaatcagcaagaagacaagaatgaatgattaaaaaaaaaaaacaagatgaaagagagggtcattaaggatagaaattactggggaaaaccagtagactgattttcaggagggctcattataaggggaatattgggaacagtttctccctgaaaggtagaaagtgttttaggctaaattaaacattcgacaatatttaactccagagtcctgtcactttcttcctccttcctttcagtaaatacataaatcaatttcttttgagggcatcttgtgtcacttgccctcagcccttagctgagcaagctaatcacatacatgaatccaaaccaacagaacagtggatgtttttcctccctggtagcatatttttatccaaataacagactctcatagttgaattttcagctatggctgcagcattttcctcttatttggccatagaaaacttcaaagcctaaaatcaaattgggagaagctgaggaaaaaagctcccatccccaacaaatgaatgtatttattattaaaaatattggggcatgagtggccatttgtccttctccactgttagagggtcctctggaaatgtctcaaagtcaaagaaaggacttgggggaaacatcaagattagagtgattcctacatgatcatagagattaaggtctaggagctcttgcctctgccttctgggtttggttgagcaagcacacattttgcatggagggattcactgtagctctcagtacatctctttggtattgaagcagagtattgacctttgtctattgtcttagccactcacaggagagtatatgaaggaaatttggaaaaacagcctcaatgttttggtagcattgtaaatggagaaagaataagagtaaggaacacgtggttttgcctctgagcagttaagaataggtgttgagacctatgtcaacaatagagaaattcaatgagatctctttcagatattttaacatagccactttccattaccttgatttgagcaattaatggtctctctgatgcccccagttactttctatgaggagtgatgaagaagagccccattaggttataaacaaaactttatgaacttataggcaggctaagtgtctggagaagattgagaaaggatgttttaaaccttaagagatgggatgttcccatctttaattcctagactaaagttctttttctgatgaacagtctgatgaacacagtttcccttacagagagttttcatctatttggtcttctctgtttaaatcctgcatcaactttacaaattttcaggagaaaaagcaaatctcttagcttatcacaccaggtcaccaatacaggggcagcttcttctgcccctaacttcatctcctgcctcctccataatccccttttgattcagatgcactgaactgcgaaacataccatcttctcattgattttacactttcatgtctttctacatgccattttctctgatggaactctatttccattttccccttggctaaatgcctctcattcttcaaagctaagcttgaaaaaggctttctgacctgccagtctggtttaggcatccctagtctatgttctaataatacctaggttgtatttgtgtcctaacacacttactacacttcactaccggcactgatttcacctgtctcccctactggatttttccttccttaatatcagaaaccatcattatgagtctcacactctaacagagttgatgaataaatgactgctacatgaagaaatgagtgaagtcaggaagcataacacctttctaattagctttagtgatagcctagggtacttagaccagaggccccaaatgcaaaactgcaaagtagcctcatttgaattttgggagagagcttttgaaaaattcagatttccacacccactaccaagtctccccatagaaggatctatatttttaggaagttccctaggtgattctaatggacaatcagttctcaagatcacttatcttggctttattttcttttaatgcaaatgttttccaacatgaactactgaagttgtggtttttgcctccccaccctaaattacataaatcaatttcttttgatttatgtaaccaagatgcaaagagaagactctttcctatttacctttttgtctgaaacgctttcttagcaaagccaggagcgtcccacccattatcagacctatcgtagaagccaccgctccaccaaagtaagtcagggcttcctggatagtcaatggtcctgctacaaaacaaacacacacacatgcaagacataagaagtgtattatgcaaaagactagtctttctctcccagaaagttttcaagaactctaagatgtgcgatcaagtaggatcaccaaaggtcctgggaatgctgacaagctaacatgaaagaagatctggaattcataaatccactgcaacagaatgggaagtggggccttattttattcctaaggcttaaatatagactgtaatttccaaaggaatcagggtgaggacccaataaaagaaattaaattgtagacacaagaagcctatacatgtaagtatgggcaaataaaataaaagtggggccttaatttattcctaagacttaaatataaactgtaatttccaaaagaattagggtaaggtcccaataaaagaaattaaattgtagacataagaagcctatacatgtaagtttaggcaaataaaataaactgtgcataattttttggcaaagattcagttatgtaacaaaaggcagtcaggacaagctatgaggggaaaaaatagggggctgaaatataccttgcaaacagatggaatttaattaaggaagatctgctaggaggtttttagagttaggtggtaagcaaaggtcttctgagataataaattagaaatctgcatgaaataactcccagtttaaaacattttgaaacttcaaggtctgttaaacagagattataacgaagcaaaaggtttcatttcacaaactgaacactgaagaggaggggtgattacctacacagtcactgggtttaatttccactactttataaggcaaggagattctgcctgattcattgtgaaacacttattaagcagggggaaacccggggatggaaagcaagaccactatgagaaagacacagggaagaaacactgattttgttattttccacatcaaagtgacttcttaacccacatgaaaattgtaccttggcaggttggcacggtagttgaccagtggccattctcttggcatgctgtttgtgcagagccattaagtaactggccctctagacaatggaaagagcagattgatccataactgaagtttccccagaggttggagcagttcatcgctattggcttattaacatgtagttctgagcatttcacagctgcagaaaagaaataatgcaagagaaacaacatgtggattggaggtgaaagagattatagtttcttttgtaacctaacattgccaataaatgaggcagaatgtaaaaggtcagaaaggatatgagccacttccaatattcacagtagctcttctaacagcacatatatgaaaatattctctcgaagggtgatatccaaagaaccaagatgcaaagatggacacatagtagcatccgacaaatacctgctaatgcattgataaatcttgcctccaaatatactatttacaaaattttggttcttaaaatactgttagtctaaatgttattactacatttgtgatcaactggcatgtcagtatgtgtttattgaaatacttaataagtgttcagcatatctggacactggaagtttgaaagaagtagactgtcatcctccttaaactacattttcagggaacttcagggttattctttctaatttatggataggaaattaaaggtcaagaaattagatttaattcaaataaatgttatttatcagtagtgacatttgcaaagcactgtgctatgttttgtgggggatacaaaaatgaaagaaacataggtctcaatgctttatgtgtagggcgatagctcttcaggaaatatcatgtatggcttaactttttatttaggttcaaattattatgaaaatatggaatgtttatactgtcacataatatgcaacttctagtttaccaatttctatagcaggttttacatttaatatgtctatttttctaacacatcttggacatctgcaaatgtttcttcctttaagtctctgagtacttgtgtattagctttagcttgtgacatgaggaaggacagaagtgaaatgcctgtgacacattacttctaatgggattggtgtggatttcataagggagatgacacttggagtagtggttgtggttgggtgagacttcaacatacaggcacaatggctagcttgagtacttgcaggaaggcaggttcagaactgcctgctccttttcaccttacctctgcatgctggagttactgctgtccattgtcctgaaggtctgcagctgagagtgctgtctcctatgagtgtgaatccagcgttgcagccaaagtaacaagtggtattaaaaccaaaggttcccggatgatgcctacagtacatggttccctgcccaggagtggtgagggctggacattgcacccctggagtaggaagtgatgctatgcctgttgtgagaaaatgtttccattcagagacctcccaattaaaagaagcgttaacagagttaaggctaatctggaataactgcttttcactcccttcataacaagggaggctcctgcaagagctatttaaggaagttaagaaaaactatcagtgtcagagatagaaaaccagatgaggaaaattattaaaaatcatccttgaggagatgattctcctggccaagagaagaaatcagaggagtcattgttgttgctattttaaaaagaagcaagaaatggtacagaaatataagaaattcagcagaaagccaaatatacatgggccaactgcctgcccaaccctgccttattgggaaatggtactgttctctgactaaaggtcaatgtgaaagttgaa

SEQ ID NO: 346 - DNA, 120655 bp, Homo sapiens
gctacaacaacaaaaaggaaataaaacacaagttaaaatagaatataataaaaccagagaatgaaaagagagatgatggagctaagaaaatgaagtgatatgttcttaatacaggctgtaatatataaattggaaacaggaggaaaatagagtcaatctaataaaggaaatttttttaaatgaatgcaaatgtacagaaaaaaggtattaaacaactaggtgaaagataaggaagacagataaaggtgatcctatgattgggtccctgaaataaggaacatttccatgaaggaagaattggatcgtctaatcaaaagggcacaccatatattaaggaacactcacacaatgcaaacatcatcaaaacatattctggttattaaaactggagtatgaataacaattatttaagtagtcaggcagaaaaagcaagttatgtgcaatgggggaaattctccctagcctcagactcttctgtagaagctttccatgctagaagatagagcaaagtcataagggaaagtaaatgtgactccaaaatactttacccagacaagttgttcaagtgtaaaagcaacaggtagatattctcagatatgaataaattaaaatttcaggaaatatagccctaatgagctcctctttaaaaaatactacttgaggccaggcacggtggctcacgcttgtaatcccagcactttgggaggccgaggagggtggttcacaaggtcaggagattgagaccatcctggccaacatggtgaaaccccgtctctactaaaaatacaaaaattagctgggcttggtggtatgcgcctgtagtcccagctatttgggaggctgaggcaggagaatcgcttgaacccgggaggcagaggttgcagtgagccaagatcatgccactgcactccagcctgggcgacagagcaagactgtgtctcaaaaaaaaaaaaaaaattactacttgataatgaaatccagccaaccaagagggaagtccaataaggaactcagaacaagataaaataaaataatgggacagtaagtattgaatccaattaaatatagaacttcaacaactgaaagaactgtgattgcagaacagcttgtaaatagtataagccctgatgaaataaaaccaaaacaagccaaaaaaataaaaaatgaaagctagaggggagggaaacggaacaagtggcaagataactaagtagctgattttataaggtcgtgagctcagtcatgttgtttaaaattgagatatggaaaaaagtaattcactaaaataaataaataaaataaaattgagatatggagccctacaagaaagcattacttcagtctcctagtgcatctttatactgtgtctgcttgccttaaagggatattttaggaaccaatatctcttatggcaaatacaggaaaaaaaatttaataggttttattattaaaataacatgcttctgtatcatctttttcttttttaaattttttattttactttaagttctgggatacatgtgcagaacgtgcaggtttgttacataggtatacatgtgccatggtggtttgctgcacctatcaacccatcatctaggtgatccttttcttttaaatttgtttctatctctgcacacctacacatccattcatccttctatctgtatatagatcactatctataattatgtccacaatgtatgctatcatcactcacctctaaacattgtgatttgatatttttaaaaatatattctttgtactgttttatattgcttgcttgtgtcatttttaaaaattcctgcctattaaaacgaattagagggtcactgatggtcgagaggaaaaggagaaagacagttggcaaactatttatttttgactctaacatgagactttataagtttcccatgtcagaactctttacaaggtcatcactttggtcaatttcaaattgatttgttattaaacatgtgctgcctatactgttccaacatgtaattctttctccttctgcttgtagtaaaacaaacccttgccaagagaacactgacagaagacataaattatcctgtgagttaaaggggcaaccaaggtttctattgtttgcagcagtggttaaggagctgttcagaggtagaaaacaaaaggatcctggtgacatgataatagctctgtgatactctgttgcaggctgctggatggtaactgtcctggccttctaccattcaacatacatgatcataccacgtgtcatcatccatagtccaaagtagaggctgagagagataatgcctatttttgaagtatatataaaacagcacaattctgaggctgtaggtcaagtgactcaggatcattttttacagacttataaatctgtagattactagcccactgtagatataactaataaaggcatgtgcctatggaaatgttcactagactgggaactaagtccctccctttgcaaaccggttggatcttgcccttagagataagaccaaagatctgcagaagggaagtttcccagcagacaaattgcaaaaatagtagagagttcacatatacccatcactgtttcccttaatattaatgttaatcttacataaccatagcacaataatcaaaaccaggaaattaggattggtaaaatactattaactacatatcttattcaaatttccccagtctccccactaatgtccttttcctgttccggagtctcaccttgcattcagttgttacttctctttagtcctctctgatatgcaacaattcctcagtctctatttgtctttcatgacctgaagacctttaaagactactgagcagttattttgcagaatgagcttcaatttggatttttctgatgtttcctcatgaccagattgaggttatgtagtttgagcatgaataataagaaggcacgttgtacccttctcagtgtatcatatcaggaggtacatcatgcccatatgtctgattaccattggtattaatcctgattacatgattaaggtggtattttgtttctccactataaagtcaacattttttccctttgtaactggtaaatatttttgacactatgccaatgtcttgcttctcctcaaatgatcacctactggctttgttatccattggtggatcttacctgtaaataattattaccgtggtattttcctaatggtgattttgtattttactccttccttctacgtgaattggaatccttcagtaaggaaaactaccttcttatattctatttatttattcatttaattgatatcagtatggacaaataaatatttattttatcctatgggttaaaatccattaatattgttatttattttgttgctcaacttgccccagatttggccactgggagctctggcagcttggatcctgtctccttttgacatgctcctatctatttgtgtaagtattttcttattttctggcaccacaagatgttccaggttcattttatattttccgtgccccaactctggaatcagtcacttctctaagaagccctttgagttccttttattggagaattgtgtttagagaacaaagtctgaatactaattatattcactgttagtgagctgtcattagttctagtcttttcaaaggatcaagctgggaaatacaggtatgtatgttaacctacatggtagacaaacatcaacgtctatttccatgtctatatatctctatactaaacactatgagttcatactagtacatctgagtctaatccaacacctcaaagttcatttcagccttccttcttctcttacttgtaaattatttctccaccaataagaaaactagcttttatctacaatagattcatttatttgttcaatcttgatcacataaatttgtcacagaattgctaaacaatacccctgtgaataatggtgttacaaataagtatagtgttagtgtattttttgtcattaaccttaaaatatccagttagaatactgttttccaatgttactatattagttatttattgctaaataacaaaattcccctagaacttagcaattgaacacaacaaaaagttttttcacaatttctgtgggtcaggaatctgggcatggctatgctgcatgcctttagctcctggtctctcacaaggctccaatcaaggtgtcagccaaggcagcatttatctcaaggctcaattgggagaagaccatcctaagctcattcatatggctctgggcaggcatcagttcgtcatgtcttttacctggaaacatcactgccttgtcccatacacctctccaaaaggcagctcacaacatagaagccagattctgtgtaagtgggcataccagcaggaaaggatacccaagacagaaggcacagtcttttcataatctaatttcagaagtaacatgccaccattcctgccacattcttttcactaaaagaaataatcaaatccatctcaaatttaaggagaagggattgcacaagggcatgaaagccaggaggtaaggatcattaaggaccatcttacagggtacctaccatagttatttaggtccattttcttccccagtacccttcagggtgactatgttgttcatttgaaatacaattaggttcatttgttactgcttatttcccaattaggttctccttcacctcatcttgcttgattttaattattgattcatttttggctggttgtgtgaaacattaccatggttctaagagtcagcactatatacaaagataaactctgagaagtgtcactgcctccttatccctattacctcattcccattcttccctttttcccatacatttatcacttagacctcgtaggcaaccagtctcttcagtttctgctttccttcctatatcttttgtacaaatgagcagatacatggttattttcttatatccctttctttcttacatgaagagtagcatattacagatagtctcttatactttgtttattcactcaacagtatatcctggaaattattccaaatgcattcattagagatctcccttatttttgacaggttcataacaccctattgtgtgtatataccatggttaattcaaccattcaggagagaaatttttgactacgcttttttgaccaagaaatactcctgcaaatatttaaagacaatttttcaagtgacaactggggaaaaagagtgcatcttctaagcatctctgcagattagaaaagcaatgtattaattctcattacttggtaggtataattagaatcttcacactccactggtagtcttgtgaattgaaacatcattttgaaagcagcacagcaatatctaagggtctcctcctttgactcactaattcaactcatgagaatttattcaaagaaaataatttaacaggggaaaatcttgacacagaaagatgttcatagaaaaaatgtatcatcctcaaaaccagaaaataatctaaatgtccaaaaaatggcctaataaatatttatcaatacaataaaatatcatgtgatgactaaaaactattatgcaaactatgcagataggaaaggttttgatacaatattaagtgaacaagcaggacataagatgatatattatgattgcaaagatgccaaatagaaaacagtagctgtgtgtagcctcaccaaagtgagatgatgctagtgaaagtggctgccttgccacatagtacatttccaagttcttcttacatacttgtggagccatgtgattgtgttctggccaatagaactgtgttaaatttatgtgagcaactttccttcctggtccataaacatcttctttgtggtttctttctttgtctgctaattggatgtcaacaccaggaaaccctgttttgaagatggcagaatctctgttagtttgagtctctgagtcccagaacctcacacataccattgctgatttggctttaataagcaagacgtaactatccactgcaataagccactgagatatcatggtctatctgttgtagcagcaagcattactttaacaccctatactatagtgatagaattagcaaataattttactttcagacttttctttaatgccaatattctaccatttgttgataatgaaaaataatgtaacacttcgatctgtaggaaatcattaaaaataagcaagtgagtcattagtactccttcatcaggaagatggttaatggaagcctgatgtctactgtacagcaaattattctaagcagagtttcagaatactcctgaataagggctagaaatattccttcgaatctcaaaatgctgtattcacaggactaccatggctagcaggaatacaataatctaggaaaccaagagcatcagagatttggggccgtaaaaatgactagcaatatatcaaagcatcaccttaatttaattgttgacgcaaagatatattagactgaacagctgctttgtgcctgtcagaaattggctgacctaaccctctagaccctgacaaaaggaggcaatgggactgtacatcattggccttaatatttgcagctacatctacaaacagcattgcttcttgttagaactcctgctaccagtttgccacctgtggctttgtgctgacagcgctggtggcttactacatcattcagaagtcagaacttggacaagctaaatgaacagctaaaggggctcacgccttttaaaaacccagatgaaagcccacgctctccagaaagccacccttacctctcttccacaactacagcaagaaaaaacctctgactcctataagctcttagaatttattcactatgtgttatgctcattgtagctatttaaatatacatctcatcttccctcttgcaatcttcttcagaataggaaccatgtcttttttatttacgatccaccccctccaccgtctcattttagggcctagaaaaggatcagacaagtcctccctaatcatttattgaatttgaaatatatttgtgaacatttaaatagtgtttcaactagaaaatgttttcacattagtaagccattgatctaaataggctggtgtgttgatgaacccaatatattatttatttgttttaatttaggaaaattttccatgcaaatgtctttcctgattaaactgattatactggccaattcagcctttccgataaataggacacttctttttttatattcagtaccaaatagttggtttgaatgcttttctttccccttgaggaaatcaattgtgcaaataattaattgttcaggctcattccctgccttatacaataagagttttcttttattgaatctataatagctctgacaacccattaagtgttgctaaactttcaagttacatagtctttgcaaaactctgatatatagatatcatatccatttgacagatagaaaacccccagagacattaactgattttccctatcccatgcagtacataaataacagtgccacgatctaaactcaattctgtctgattccaaaacccactaggccaacacttgtccagaaggagaaaaataaaacctgtgtctgagtagattctctgggtgaagcaggttctctcctttaaatgtagcaactggagcatcagagaacataatctggcaggcttaaattagcacagcgaattacgtttaatggaggagttgttgagcagatggggaagaaatctgatcaggtcctaggagaagctgaaaatggtgtgtgttgggagaattctagttgtggcaaactgaaccacacagggttatatgtttccttcccaaacaccataaagtgagagtaaaggaataaaaatagaaaaagtctacaagaatgaaacactattaaggaaaggaacattcagaaagcaaaatacactcttctagattgagaatttagcagcatattggccaggcctggtggctcatgcctataatcactgcactttagaaacctgaaacaggaggatcacttgagcccaggagttcaagaccagcctgggcaacatagtgagacctcgtctctactttaaaaaatcaaaaaattagccaggtattacggtttggctctgtgtccctatccaaatatcttaaattgtactctcataattcccacatgttgtgggagggacccagtgggaaataattgaatcatgggggcagtttccctcctactgttctcgtggtagtgaataagactcacgagatctgatggttttaaaacaggtttccacttttgcttctgtctcattctctcttgtcatggacatgtaagaagtgccttttgccttcaaccacaattgtgagtgatatggcttgggtatgtgttcccacccaaatgtcatcttgaattgtacccccataattcccacatgttgtgggagggacccggtgggagataatttgcatcatgggggtggttcccccatactgttctcatggtagtgaataagtctcacaagatctgatgattttatcaagggtttctgctcttgcatcttccttagtttctcttgccaccatcatgtaagaagtggctttcacctcctgccatgatcctgaggcctccccagccatgtggaagtataagtccaattaaacctctttttcttcccagtcttgggtatgtctttatcagcagcatgaaaatgaactaatacagtaaattagtaccagtagagtggcgtgttgctgaaaaaatacctgaaaatgtggaactgactttggaactgggtagcagagaacagtttggagggatcagaagaagacaggaaaatgtaggaaagtttggaatcttctagagacttgttgcatggctttgaccaaaatgttggtaatgatatggacaataaaatccaggctgaggtggtctcagatggagatgaggaacttgttgggaactggagcaaaggtgactcttgttatgttttagcaaagagactggcggcattttgcccctgctccagagatttgtggaactttgaacttgagagagatgatacagggtatctggcagaagaaatttctaagcagcaaagcattcaggaggtgacttgggctctgttaaaggcattcagttttaaaagggaaacagagcataaaagattggaaatttttcagactgacaatgcagtaaaagaaatgcccattttccgaggagaaagtcaagctggctgcagaaatttgcataagtaacaaggagcccaatgttaatcaccaagacaatagggaaaatgtctccagggcatgtcagagacctttgtggcagccccctcccatcacaggcccagaggcctaggaggaaaaaatggtttcataggccaggcccagtgtccctctgccatgtgcagtttagggacttggcatcctgtttcccagctgctccagctgtgactaaaaggagtcaaggtacagctcaggccatgccatcagatggtgcaagccccaagccttggcagcttccatgtggtgttgagtctgtgggtgcaaggaagtcaagaattgaggcttgggaacctccatctagatttcagaggatgtatggaaacgcctgaatacccaagcaaaagtttgctgcaggggtagggccctcatggagaacctctgctagggcagtgcagaagggaaatgtggggttggagcccccacacagagtcccaactggggcactgcctagtggagctgtgagaagagggccactgctgtcctccagaccccagaatggtagatccaccaacagcttggattgtatgcctggaaaagtggcagacactcaatgccagcccatgaaagtgaccagaaaggagggtataccctgcaaagccacagaggcagagctgcccaaggccataggagcccatcttttgcatcagcatgacctggatgtgagatgtggcatcaaaggagatcattttggaactttaagatttgactgccctgctggattttgaacttgcatggggcctgtatcccttttgttttggccaatttctcccatttggaatggctgtatttacccaattactgtacccccattgtatctaggaagtaactagcttgcttttgattttacaggctcataggtggaggggacttgccttgtctcagatgagactttggactgtggacttttgagttaatgctgaaatgagttaagactttgggggactgttgggaagacatgatttgttttgaaatataaagacatgagatttggcaggggccaggggcagaatgatacggtttgactctgtgtccccacccaaatctcatcttgaattgtactctcataattcccatgtgttgtgggagggacctggtgggagataattgaatcacaggggcagtttccccatactgttctcatggtagtgaataactctcacaagatctgatagttttatcaagggtttccccttttgcttctttctcattctcacttgccacagccatgtgagaagtgcttttcaccttccaccatgagtgtgaggcctccccagtcaggtggaaccataagtccattaaacctatttttcgtcccagtctcaagtatgtctttatcagcagtgtgaaaacacactaatacaccgggtgctgtggcacatgcctgtagtcccagctactcaggagtttgaggctgcagggaagtatgatagcaccattgcactccagcctgactgacagagtgagaccctatctcaaaaaataaaaaaaagaacttaatagcatatggaagctaaatttgagacaatctgatctccttagttgcagattggcaggctaggtaaactgaggaggagatgtaaaatcgtccccctttaaaaataaaagaattcaggtagctgtccaaacaaataactacagtcatagacctttccaggctgcaagcacaatagactctagagaccaatactacactaactctatatctacagtgtcgaatactgctttgttaactccccacacactcaactccccaacttcagatgttccaaaaaatgatatctcttctcccagctcaatatctggtttcaccttgaccagctcagtctaaccactgcctaaatgccttgattttggtgaagaacttcttaaggcatggaccagcagtctttggtatctgatatggtttggctatgtccccacccaaatctcaacttgaattgtatcttccagaatttccatgtattgtgggagggacctatggggggggtaattgaatcatgggggctggtctttcctgtgctattctcatggtagtgaataagtctcatgagatctgatgggtttatcagggatttctgctttttcttcctcctcattttcctcttgccaccaccatgtaagaagtgcttttcacctccctccatgattctgaggcctccccagccatgtggaactgtaagaccaattagacctctttttgtttccagtttcaggtatgtctttatcagcagtgtgaaaacaaactaatacagcatcactaactttctaggcaaggcaaaatacaaatccatcacctacaaaaaacacatccttccaaaatggacatttaaaatccctgcataatgctagccttgcaggacagaactggtgccagtttcaatggcttatcgtatataaagttgttctatttggggtgcatggtttggcctgcaatataactgaacatatgttatagtagagttgggtgtcatagagttctactacatttattcctgcagaggcaaggaaatctggtcctttactgtccctctagggttgagactagaagataaatttatagtccagatattttaattttaagggcttgggttaggcaaaaattatttttggagaatattccacattatgtcacacatagatcaattcaaggaagatttatgtctctcctttttgttacaattataactaagcaactaagctttcaaattgaaatgcataggaacttggatgatattccaagaactgagtgcttcagaatgttagatcatttcactgatcttgctttgcaatgtcgtaatggtagcagaccatgtgcatgcacatacacagaggctttgtgtagagtttatttgtgtagaattccttcagtctgtggttttattcctaaaattccacccagggaattagtaaagaaggttgtggaaagtgttatgtgtttgtttttagctttttgtttctttgttttggtgagatacattttgcatctcttagaaatgaaaatgaaaacgagaaattccccctgttagtgttcatgatgtcctcctccacaaagatgctttccaaggatcacagcaggtgcactcatcaacactgtcctgaacacacagctgtcccaggaatggatttgcaaagtgtaaagaggaataagaagcattttatcatcaacttaacatttactgcaaatattctctcacttttcaaggcttcaatgttagtactcagttggctatcatgatatttttttcttcagcagtataggagatatatgacctctcttggtctttatttgactagaaccaggtataaaattcaaagtatttaacaatcaatacccatacgtactgaacaatcagagaagatgcaggcctgagggctggaggtagttgctgaagatcccttctttaccataatttaaccccccttaattgctagctgggcagagggcggtagaaaaggtctgtcctgtccatgcaaagcagctgaatatagccctgactggaactgaaaattaggctaaagcaataaaactgacccaccaacgtcagtatagctagatagtacagtggtaccattgccactggtaaaggggaagctcatgatcatagcagtggtaatggtaataattatagtaccagcaggagaagcagcagcagcaatcaagctattgtcaattgaggatttggcagtgagctagcaatgaaagagatatcattctctggaacatctgaggttggagagttgagtgtctggggagttgacagagaagtattagaaactttggacatttattatttctaattgtcaaagaaacttgccaggcaggaaatacctacaacctgtagatacagacacaaagtttcagaaactttaagtaactggctccaagtcacatagctagtacaccacagagccaagactggaaccaaggacactccaaagcctgtgctatttctcttatgcaataccagccttctcccatgcaaaagtaaaccaaggactactgccatctacctggaggctacaatttcatgacttaattcttacacgttcttataaacttataattctacaataaacttttagaaatgtttactacaaggactaataaatttcagcagtaaaatttaagaatgaccaaaaaagtgatataaccagtgttttcaatgttaggtcactctacatgtttcttatttaaagatagaggtttcaaccatttaagacagccaaacttccccctttcttccaacctttagtaattttcatgagaatgtttagatgctgaacttgattgacagtgtagtgactgatattcttctcataagtaattcatgctcatatttaaactttggaaaacacagagaaatataaagaatataaaagtcacccacaatcccattgcccggagataacaacagttaaaattttgatctctttttttccaatcattttactatgcctatatcagcacatatacacatatagacacatgcaaattgagatcatataaatattgtcaaatgaaatgtcatattatgagcattttctaatggccattaaaattctgagaaacacaatttaaagctttcttaatattctaacatatagatgtagcataatttatttaaccattcccctatctttggagaacagcaggccttggtcagtaaataaatggttgtataaataacaggatctgaattaaatgcagaagattaagaaccccaggttattccttggtctctgcaagttaatggaatccagagaggcaggacaatcaaatgcaatatttttagccttttgaaggatccatccatatacatatatatttagcctttgttgccgacgtgttatgctgaaagcttccccagagcaaggtgtttaatgcagaggcttattgccagaatggtaagagtcactctcacatctgtatgggtccaaaaccagcactagagaacacaagggggggaactccattggtcccatcaaaatccagctctatgaaaagtacatcatggtttttaaataattcccttcaaatccatgatatgtaacaaacctggaaatttgagctaaaattgtcaatgatttcatttgttttttctatgctctaagtaatgggccatttttttgttttgcttccagctttattgaagtataattgacaaatcaaaattgcatgtatttaagatatactatgtaatgttttgatatacatatacattgtgaaatgattaccacaatcaagctaattaacacatccatcacctcacatagttactgttgtgtgtgtgtgtgtgtgtgttgagaatacttaaaatctactctcttagcaaatttcaagtatgtaatagattttttcttttttttttttttgagacagagtcttgctctgtcactcaggctggatgcagtgacacgatctcggctcactgcaacctctgccccctgggttcaagcaattctcctgcctcagcctccctagtagctgggattacaggcatgcactgcccacctgatctttgtatttttagtagaaacggggtatcgccacgttggctaggctggtctcgaactcctgacctcaagtgatctgcctgcctcggcctcccaaagtgctgagattacaggcgtgagccaccatgctcagccgaattattattaactatagacaccatgctgtacataactgcaactttgtaccctttgaccaacatctccccatttcccccacccgtgccccggtaacagccattccactcatgtttctatgaacttgacatttttagatttcacatataagtgagatcatgcaatatttgactttctgtagtaatggtctggttttaatggggggatttctggctccagaaagcataaacagtaatttcttgcagctattgacatacagaggtgactcactcttctccagatacattattaaaattaagaaaggattatatttcttactggtggctttgaattgaggaggattttgtgatcaaacacagttcaggtagaatagacatgggatcagaatcacctaggactcagaaaacagctgagacactcttatggaacaatgttttcaaaggatggtgagccagaaacagctagaagtacaccaaagcatagtgatgtcattgagaaatgacagcctagccagtggctacatttcacagttctttttgcatctatgtggggccatgtgactagttctggccagtagaatgaaagcagaagtgaagtacgtaccacttcaaaaccaagtgtcaagtattctgttcttgcactttcccatctgaaatgaccatgaagactcattattgaagatgatggcattgtaagatggaaggaagcagcatccttgagtcagcatttagaagatagccacccaagacaaatgcctgaccaagaacatcaacactggattttgtgcaactgagaaataaatgtttattgtgtcaagtcattgacattggagggttgtttgtgaaagtagtctgcatagcttgacagggactcattaaaaaggcctctgccatctgagcacctgatttggaagagatagagcatgggaaaaagataagtgtggagcacttcttcaagatgaagaacacaaatcatgcaaacacagggcaaagagaagacaaagcaccaagggtaatagtaacaggaaatcaaaggctaatcaaaggttaagtccaccaaaaaataaaggtggtggaaggaagtctaaaatcaaaaagggttgttatatgacttgggcttttgattttttccatggcctacatgaccaattaaacaatagttacaaatgtatatttctgtcaacaagtggcttttttactttggtatctgaatcatttccgttcccctaaataatctcttttttttttggttgatgactcttcactgttgattttaggtcacactgtaattcattgtgttctcctgaaattttggttactggtacaagcaacaataaagacatgaaaaataatttgagattttgttacatagattaaagatgttaatgaaagcttttttgatcctaagcaagagcactcaggatttttcagttagctatagactttttagacatctgctatcgttcaccatgacacaaagctgcaccattctgtttactgatatctcgagtgttaaatgctccttatattactctctgaggataaaagaatgttgaactgaaataaagtgttagcccttgccttctgctgaattactgagcctcatttccgcctatctatctgtctatctgtctgtctgattgtctgtctctcagttttaagccctaataatgacctgggcagggaatatactagacactaaaataaatcctgattaggacacagtcttatgggagccccagtcatgccaaaaggtgggatctagagtgtatcttgctgccctcatatggtcctgggtctgcttgatgtttactatatccagtgctctctcagttctttacagcctgggggcattttttcctcaacatctgggtcaaaacctggtacacagtaaatagtcaacaaacgtacattgagtagaactaagctctggaatgctcagtcatgattgtcatggaacactttatgaattattaaagtctgtttgtgtgggcatctgcctcactttctgcctagggctaaatatcagccctgcaaaccagccatacccaaccccagcactgatcaggcccctcttatgggaagttggaccctgttttcagtacctactttttaattttttaattattttatttatttatttatttatttatttatttatttatttatttatttatttattttgagacagagtctcactcagttgcccaggttggagtacaatggcgcaatctcagctcactgcaacctccgcctcctggattctagtgattttcctgccttagcctcctgagtagctgggattacaggcgcccacaactacgcctggctaatttttgtattttcagtagagacagggtttcaccatgttagtcaggctggtctcgaactcctgacctcaggtgatctacctgcctcggcctcccaaagtgctgggattacaggcatgagccaccacgcccggccatcagtaactacatttatcgctttagcaccttctccaaagaaccaaaagaaattatctacttgatttaaaagcatcactcacttctgccacatgaccctctctcgcccacccacacacatacagactggaaccttgaaggtttccacgcaggctttactcaaggaaaagtttacccgactccattaagtcttccattttccattattggatagccatgcctctagaacatggtctataactctgcttttcctgttaacttttcccactatttccacagcttttccttcaatacctgctcactgcaaaggctctagtaagtcccttatagagtcccctctcctctgctccccaactccaaggaatgacctaaggctagctggagaaacttttcaaatgatctcggctacctatcagacctgaggtttgcactatgcaaataactacacacataattagaaacccatagaatatggttgttttctaccgaaaactcatttgatccaggatttactgaaggtagaacaactgcaaggaattaaggtaacacatacctgtgaatataaataaaatgaacgagagagggaggtggacatggttataaaacaacaacatgagagatccttataaggacataactgttctgtatgttaacagtatcagtgtcaatttcctaatcatgatattgtactacagttctttcaagatgtcaacactggggaaagtgggtacaatctctattatttcttacaactgtatgtgaatctataattttgtcaaaataaaaagttttcttaaaattaatgaatgggagtaaaagaaattagccacttttagaatttgctcttaaaggttctgtgtagatatgcaaaaaagcaaaaaactttagctgaaaatgactgaattgatttgctggtaaggaaaatttctataagattcaggttaggcaattctgagtaaagaaaatgaagaatgagtagaaaaaaacatagtggcagaaccttctggaactcaccaggatttgaaccatgcaacttctgataataatacaaataaaactctccaaagcaaaacatttaatcatgtcagttcctacattgtgcatgtcataatgatagctacaagtgtaaaagaatagcctttccattctaccttattccatttaaaagtctagcatatgaaatagtaaaatgaacctcacattctctgttataagttaggtgagataaaccacaattaaaaattgagatgcctgataaccagagaaagaagtgttaggctgcaacccaagagtcaactaaataaatccctggcattaacttggaactgtctctaacagttgcaatataattcaaattattaatgacatgatagctgatgtgttgcaatcctctcagtagtgatgctaagttatactcgccacatgtacattcactagaaaatcatcataattaattttagtacagccccgagctatcattagtgataaatcatgataatgattacattcaagtttaatgttattgactacatgaattataatgttattaacaaattagattgaacgtcttatctaaaactaatgttctaatggggagaagtaaacccctttccatctgaagcccagagtaacttactggttgccagtcctgtctccctattaactctggtggtgtaaggtggataaaataagaagtaataagtctccaattcaacagataatcaggcccttcttcatagtaaaaatgaaggataaccttgcatttcccacttgcagagtcattagccaaggcttccagcttcctggagagagatccagagagctgacattatgggcacctaataaactgaaatatccaggtctccaagtcgatattacaagagtagagatattgccagaaattaaaagtttcagggtaagtcagaacaggaagaacatgtgctcacccagctgcaatcagccatcactgccagggagggcctggtaaagaatccataccccggttcacaggatagaaccagggacagtcatgtgcacatttccccttcttcatctctggccccaaggctttcacttattttttatcttggactatctgtttcattgcaagtcacctcaagtcattttttgaatgaagtacagatgaaaggataaaaataaatgtcaacagtacactagccttgcttgctgaccttgtttgctgttcttgaaggcctatatctgccttttttcattgtggcatgttggcagcttaagttgtgaggttgtgaatcgccattgatcaattgctgatttggacatgggcatttatgaagaactgtcctgatcagaaaataacccatctagtcctttctgatcccttcagttcaccttttttgatccagttattatggttcttgatatactcataaacaataatagttaacaaatatcctctgagtagatactatatgccaccaggcattattcaagtgctttacgtgaattatctcatttaatccttacaataagcctccataataggtactgttattattccaattttacagttaagagaaccatggtacatacacacaaaattaattgacttacctagtggagctgtattcaaacccagttctgtctatgtgactccatccctaaagctcataggtacttcctgggtagggttgcccagctaaatttgaatttcagataaactgttttttttaatcattctcaatacttcatcatctttgccttgttttcttttttaattacaaaagaagcagatcaccactaaggagagtaaggactgaaaatacaaaagggttcatgagcaatagagacacatctatggagggtgtgaaaattgaaaggtgggctttcagatggaatgacacacacaaagacacagaggagataaaaatgagctaagttttctcactgctcttaggagttcttctccttactctccagcttctattttccccaccaaaaaatgactgagcagcctatgttttgaataatttttccttttcattaaatcaattcagtcatggtagtctttaggcaaatgagccttaaaagcattatcgctaaaaactcttcttccactgattgctgacagaccaacttctacaacatatcaaatacaaagtgtccaaggcaaatacaacattttctctagaagctatagctcctcaagacaactttatgtccaaatctaacattttttgcaactataccctataccaacacagaatatcaatccgtacacatactcttcattgtgtacctccacacttttttgattttttttctttttcattatttttttttgagacaggatctcgctctgtcacccaggctggagtgcagtggtgtgatctcagctcactgcaacctccgcctcctgggttcaagcaattctcctgcctcagcctcctgagtagctgagattacagttgcatgccaccacgcctggctaatttttgtatttttggtagagatggggtttcaccatgttggccaggctggtcttgaactcctgacctcaggtgatccacccatcttggcctcccaaagtgctgggattacaggtgtgagccaccacagccagctgcttctttgatttttgttactccttcacattcacatttttgagcctggcatcaggtgtcatccacataccctgtaccatttcatctaatccttataacaaacctgtcaaatgatcagtattatcatccctattttatacgtgatggtaagtcactggagtgacttaccaaaaaaacacacactagtgagtggcaaagcttggttggatttgaactcaaatcttctggctcaaagccccatattctttcaactatacacagcttctcttggatgccaagtgcctccatttgtaccctactccaaattttcacctaagaaaaacactttgtaaggttcatttcaaacagtatctgctccataaactcttcactgatcatccaataaaaaatgaactctccttactttgatttctttaccatgttctttgtccactcagtcattcaataaacaactgagcacctactgtgtgccagcttctatggcaggtgctaaaggaacagcagtgaatgacacaataaggatgctgatctcattgcatcatatattttatggtataagtcagagaatcatagtttccaatttcatgtcatctatagcccttattttacagatgagtaaactcacatacatgaagttcaggttcatgccattataggcaggccccagaatagaggccttcacctatccttcccattaacgttgtttatctccatggcttcttttccctactaggctgccaataacttgagggcaggaactgtgttttaatcatctctgtacattcctcagcattagcacagacattcaaaaaaatgggtgcaatgtgtgataatggtggcaaacaggaaagacagattatctacactcttagagctccaatggacaaaagagctagatatttaacatttaaaagtatgttacaatttcaagtattccctcacatcacttttcagcaaaagagctttcataaattacagatatacactgctgagttaaacttgtggaaagtatcacatatttccaaaatggaaaatgttgttttctgctataatagcctttaatccctcattgttttctcccttaattcaaatcccaataattataaatagcacattaatacataacttatctggaggctacatagctatcaacttcgaccatgaggaagtcatctaaaacacaaaaagacgcagagaatccctctgagcagccaaaatacattttaaaaaatacaggcattaaagaaatgtattgcttctttagtcaatatattagatctttactgtttttattcaatgcatacttaccgagtgttcatgctttctctgtgtctgaaaatcaccctgggactcttaactcttatttggggcacaattctaatagacatatacatctaattttcatgactcacagccaatgaaaagcagcaagcagaaggtggataaggttggccagaagcaggctactgtatcccattttcctacttcattgtaattcctaccaccacaggcatatgtcaacaataccaaagaatgaacacaaggcagcgtcagcctatggattactatatttcacatttaggaaataagttatatataaatacactgtggaagataacttgggttccttcttcactgcagccaggtaatgatcaggcagtaatggctaatgaaagaaatatttatttttctttctgtatttaaaagacaaaatcatcaactatgcataagtgaaggattttgtttccatgagactcaaattccctctccttaaattgttctgcttttgagcagaatatacgtggattactttttaccagcagagggaggtgaaaaacaaggaagctctgaacatttctctcttcaccacagaggttaagtctttttgtaatgtgactgattggctccctttagcagcatggtctaatttagaaaggtcaggaaattgtgtttaacgtctactgagtcaacaaacttaggaaaaacacaagtggcaaaaagaaaacactctcagcaggattggcccttatgcaatggctccaaggagaagagccgagggagaagcttagcaatgtctgcaccactgcacactgacaagaaatcctttttgccatgaaatcacacttcgcatatttttacagtgtgaagacatatacacttcagctcagagagagtttactctttgttgcaatgaaactgatgaaataaaggcttttgttgttgtttttacatgaatatcatcagggctaaacccaacttcttggcaggactagggggaatgggcagagggaggccatctcctaccactgctactacccctgaggtccagcaaatatgggcatgagggcctggggaaaaaaggcatatcatagagaaaagaactttcatctgaagaatgcaaggctttttaagttatgaggcccagagagacattaaaatgagaccacaatcccatcctatcccccacgtgagctatgaattcatctcaaaactacgtgtttttgccacaagtagctataaattaatctaataatgccacactggacactataacccacaccctatagcctaccaacatataccaatcactaatcaatgttacttctataaaccagcgagaattcctgacaaacaactttgtatcaatccactccttgttccccctttttgcctttaaaaatccacttgcgaatgctgccaattggactgtatattcagggcaatttgcatctatgctcctggttgcaatcctcaagcctggcccaaataaactctaattatattaattttgcttcagcttcttccttttaggttaacaccacttaggattctcccagggaggcttattcagcttattcaggtgtataaatctaattttcctgccccacagccagtgaaaagctgcaagtagaaggtggaaaaggttggccagaagcaggctattccatcctactacttcattgtaattccaatagccacaggcatatgtcatcaacgctaaaaaacgaacagaaagtaacaaactgggaagcacagtatgatggttaattttaggtgtcagcttgactgcattaaagaacatctagagaactgtaaaacatcacttctgaatctgtctgtgagggtgtttccagaggagattggcatgtgagttcgtggactgagtggggaagatctgccctcaatgtgacaggcaccatccaatcagctggggacccaggtagaacaaaaaaggcagggagaagactatttccccctctttctcctgaagctaggacactcttcttctcttccccttggacagcagaacttcaggctctttggcctttggactccaggatttataccagcaccctcagttcctgctatgggttctcaggccttgggctgagagttacaccatcggcttccctggttctgaagcctatagacttgggctgaactatgctaccagcattccgggatctccagcttgcagatggcctgttgtggaactttacagcctctatattcatatgagccaattcccctaataaatatcctctcgtatgtctgtatttctattatatatcctattggttctatctctctggagaaccctgactaatgcacacagtacaaaataactatcagacaaaaccacaaccaaggaaaaagagaatcatgctttaaaaaatgcaaattttgtcaaattatttgcatcccctgagaaacaaggacagggatagcaaatctagaggaattccaagttctaacataaatttgctgtgtgaccttgaacaagtcacagtccctctctttgcttcaatttctccatctgcaaattgagaaaatagtatggactagagaatctttcaaatagcctctcagcctaacactctgagctcagtgattcaattgccagattgaaaatatgtaagtagcattatcttcccaaacaaaggttatcacatgaatttgtttgttcatcataacaaagacaggtcaatgattataattataattataataggtcaactgtcccacatgaaccctgctcaatttccagctacataattatattgaggaacaggaacacttgctactttgagctgatagcaaaattcctctcctctctgggagagaactgtttctatttaggacaaagaccatacttagttatgaagatgagtcccctgggcagaacctgcatggtctgggctgagaccaacttaacagctaaactgctctaaacaagaaatgaaaataatttgggtggttggaaggaaatgtgctggaaagggaaagagaagaggtggaaggccggaacaagaggccctgcagcacaatggacagctaaatcacaagtttaagggaaatctggtactagtgttgctggatcaaattttactgggcatcttgtattttcacttcaggtgaacaaagaataatttttagtataacttttccaaatattgcttgagacatactaaaaaattcatttatcagaagttcagattttactgggtgtcctgtatatttatttgctaaatctggcaagtctaccagtggcagaaatgacaaacattttaggaacttcaatctgagattgtttagctatactagggtataacctcccttagggctaccactaatccataaagcatgattacattaattagaaaaaggtgattcttcttcccagtacctacctaaggcacaggcttaatgagtgtggttcacgggttagatttcagcctcgattctcctctaaatcctgcctctcttccatgtcttcaaacctttagcaaagtcttctgtacatggccctaggttaagggtatggaagacagtgaatgaaggtctcctggccccagagtacaagatttgcatagagaaatgcaggaaaagagaagcaagcttatttcaggatatatgcctcagaggaaaggtcaaggattcagtggccacaggcaatagcatccagagtgactgagtaagagtcctcagaccttgccaaaaatcctgagatattagagaggttgtaggctgcccattgtatattgggtgagaattagagtcaataatcagggaaagggtaaaacctgaagatggaacaatttggaatataaatgtggttatataactaaagagggaagtaggcagttcatgaagatttagagatcatggagaaagaggaactcctacttatactcaagacccaggtcaactgttacctgctctgtaaagctgatggttctaggcagaatttattcatttttctttgtgctccaattctcctagcacctgtatctgttagaagccacgtggaaaaaaacaatcagaatataaggtacaagtctctctgtccctctcctctctccctttctccattctcgctttctgtagaagcagattatgagttatttgaaaacaaggactaggccgggcgcggtggctcacgcctgtaatcccagcactttgggaggccgaggcgggtggatcacgaggtcaggagatcgagaccatcctagcgaacattgtgaaaccctgtctctactaaaaatacaaaaaattagctgggcgtggtggtgggcccctgtagtcccagctacttgggaggctgaggcaggcaggagaatggcatgaacccgggaggcagagcttacagtgagccgagatcacgccactgcactccagcctgggcaacagagcgagactccatctcaaaaaaaaaaaaaagaaaaaagaaaacaaggactgatatatcaattttataattgatattatataattattatataaatttattaattttatataatattaatatttattaattttataaattaataaattattatatagaatttattaattttataaattaataaattattatatagaatttattaattttatagccccagtgattggcatatactagccaacagatacatttgtgaaaaaataaaatatattttgagtttaaaattaagactgtagaaaaacataataatagttttaagtatatggcagtgtttatagttgttttctatgtttttagagggcaacataagaggatagacatctcaaatgcaacatgaaggaagtagaataggcataagaaagaaaagaataataatttcagccactgggtgatcagcctctaatgtaggcttttttaaaaattcatttttaattcactttagtcagttcaatacggtcctacctcagggacccttgcagatctaaaatcctgtttctcatggctctaaactccaagtacagcaagaacagtagctaccatttccctaacccagtagggtagttcacttttgcaatgctatgcaaatgaccaggagagctgacactttgggaagatttgcccgaaaaggaaaacaaactgctagtccagagaaaactcacagttacctacttttattccactctgaacttttcctttaaggaggaagagttgcaattgactcctgaaagccctgctgattcagtcctgttgactaatcggtttgggttaattttggaaatgctagaactgtctgaactcttgtataaaagaattgtaaatagaaatctggaaaggagaaaggaaggacaggtcaagtcttagaataatattgctaatagtgatgagaatttttctgccctacaaaatctcgtggcttcattctccctcttttgttcacatttgacttaaaagaaaaaaaaaatgcatccctcctttccaatgttaagtccacttgacttggtgctttatgtgcccatccctcttatattaattctcattgtttccaccctcctcctttctgtttgtttttccccaattcctcttactctgatacctttctcttggcttacacacatgcttggttctcgccaaagcctcacttttctgcatctctgctgccttccaagcaaacatgactcgttctcaccaatatccagttgtcctctcctcccaggcataaaaagtaagcactgtccactctcctgcagttacataggcttatgtgactcgttttcaccaatgaactatgagtgaggtaacatgtcacttagggcagaagcttggaagagcaggtgtgaaatgtccatgcactctttttcactgaagcggcaactgaggagacttcgtgttccagaaggcacagcaacagatgattcaagtctctgttagcctgggtcaaacagagacctctcctctggattatgatgattatacagtatgagtgagaaatcaagtatttttgtgtgttaaagcattgagatttgaaggttatttgttaatgttatattgcttagacagtcctgattaatacagtcctctttctctcccactttactagcagatatcttgaaataatagtctaaacagtggttgtcaaatgtacctgtgcataagtgacacctggagtgctttctttttctttttctttctttttttttttttctatactttacgttctgggatacatgtgcagaatgtgtaggtttgctgcataggtatacatgtgtcatggtggtttgctgcacctatcaacacatcatctaggttttaagccctgcacgcattagatatttgtcctaatgctctccctcccctttcccccaaccccgtgacaggccatggtgtgtgatgttcccctccctgtgtccatgtgttctcattgttcaactcccatttatgagtgagaacatgcagtgcttggttttctgtctggagtgcttttttaaaagccagatttttaggccccaccccagacttgatgaatctgaatacagttctgaggcttggcaatctgtatttttacaggctccgcaagtgactctgaagcagccaaactgcaccaatcctcagacatggacacccagagttttactttctcacctcccgtttacacataaacattctgtaacctggtttctccattccttacccttgctactaaccctcagaagtcatgtaagacttccaggacctcctaattgcaaaatcattcagtccctgttgtattcaaattccctgtagcaagtggcaaagttacctgccactccctttcgtgaaattctcttttcctttagttttcatgatatgatgctactattattggctttcagttctgtgaccaatgtgtttttctttttcttctttcttgtttcatccttagtaaaagtgaccctatactttttaacaacatttttattcattttgacaaatttcagttctgattgtgctcttgtgcttttttaatggttgatttttaagccattttagtttttaattttaaaattttaaaaaaatgttgtgggtacatagtagctgtatatatttatggggcacatgagatgctttgatacaggcatgcaatgtgaaataagcatatcatggaaaatgggatatccatcccctcaagcatttattctctgtgttacaaacaatccaattatacactttaagtaattttaaaatgtacaattaagttattattgactatagtcaccctattgtgctatcaaatagtaggtcttattcattatttatatttttgtgcccattaaccatcctcacctcctccccagacccccaatagcattcccagcccctggtaaccatccttctactctcttatctccatgagttcagttgttttgatttttagatcccacaaataagtgagaacatgcaatgttagtcttcctgtgcctggcttatttcccttaacataatgatcacctcttgccagcatttgaggtagggagagtgtaggcacttatgggaacctattgcagtaggatctaccctagttttattttacatttccaactgccttttggcagtatctccattcaaatgtttaaccaccattgtaaacccaacatgttcaaaaccaagcaaatcttcttatctttcaaatcaatgactttaactgatttctctagttctgtgagtgatcctatgtatctagtcacccaggcttacaaatttgctgtcacgtttgtttcctctctaccttatttccaacattcagtgagttacctagtatgatggttaattttaggtgtcatctggattaaggaatacccagataactggtaaagtgtgtctgtgagggtgtttccaaaggagactgactcatgagtcagtggactgagtggggaagatccaccttcaatgtgggcaagcactatccagataggaaccccaatagaacaaaaaaaggtggaggaatggtatttttttctctgtctttccaggagctgggacattcttctcgtgcacttggacattagaactccagactctctggcatttggactgcaggacctgaagctttcagacttgaactgaaccatgcctgttaggggacttctcagtctccataatcatgtgagccaattcccttaaaaaatcccccgctcatctacatctatatctgatctatatcatctatatctacatcctatctgttctatcttcatgaaaaaccctgacaccaagtcagaaccaatttagctctccaatatgtcactcagtcctgtcgcctctgttctctttccactgccaccagagtaagtcaggctcacatcatctctacctagaccagtgcagtggcctaactacctttcgcactttcaagatattccacagagtgctatgcaattcatgttcaaagtaagagctgctctagctgacattggagtttaccccaatatttctttccagccatttttcttatcactccactactttacctggtactgtaccttgaccacgacctatgttttccaatccctctccatgccttaattagctgagataaaacactctatatttaccgagagcatagaatttaataatcacctctctaccatccttaatgtaatttgagtgccttgcactcaggaaatacagctcagtacatatttgtggaagtatgtggtgttctatggttcacagaggatatattatacatcttcaaatttgcttgttaacataggttctgcatttggcaggactctactaatcccactcccaccccaaaatatacaattcttcgtggttgatgtttgtcagctttgggctaacctaactgggccacaaaatgaggaaagacagccatctggagctttaagagcatgccctttgcccagggaaacatgccaggtcatgcagaggaaggctgtattcgtgaaattacttttggcatcaagttcaaccctttgcatcttgctttcctctctgcttgctcccttatgcttatctggcttccagcaaacactgcccttcaagcatgatgacctgtttgatcaatctcctggctcttgaccttcctgctttccttcctaggtataaattacattcttcctccagactcagaattttctcagactcagttccaagacagcatttggcttggcctcaggacctcatgactaggaagagcagagttctatcccattccgggagaaaccatacaactatggggctgctttcaaattttgtgctcaagtctgatggcagtaactaaaaaccatctgttgtcgtgttttagcatgagtggtatagcttgcaaatgccttggtgcactaccttccatcagttattcttgaaattctaggttctgttgtggagggatgtcagaatcaaagttgattggcctcttagcaaaatctctggtgccagaaagggactgtgcattgattttccccattgtgtgtggcatccttatcacctcccagcatactgctccttgttggtactttttctagactaaaaagaaaaagcactatctgttttttcccattcttacctactgaaaatcctgtcacacttttatgcttctgagatgggcgataggaaggtcttgactaaagggcttcaggacactaatccacataaatggcagatctgatatcagcatgattgctctgcttctctcttcacagttctggaacaaaaagtatagggctgtaaggaaaatatttactcattctgtaaacatctggggagcaccaactctatgccaaatggaaggaatccaaattttccttctctcaagtagttcacaataaagtaggaaagacccaaacacatcgtttccttttcttattataatcacttaaaagaagcattttctcacattcaagaggcctctgttccacttttgcttgcccacttctgtctttttatttcttgcaaaagaaaatgagttttgcttagggaattgagtatatagatccagtggacagaagataaaagatttccatggtagtgacttacttatagcattttccttgcagagattattccaccatagaaaatattccattagcacgagaggttgcttcatttcatcttccttttgtcttatggaacccctattgtaagaaacacggaacttaaaaatgtccaaccttaacaaagagatcacttcccagtattgtgaatacatggagggtagaggtgaagccatgctactagagaaacacaaaaggttgggcctagtgcctggcccaggctgggaagtgggagtcagcaaatggttcttgaaggtaatacttgagccaagactgaaggataaggggagagggaggagaacaagtcaggctaagagggtctcattcctggtagagcagaatgggagcaatggcctcaggatgaggagtggcaatgacacacagcacctaaagatcactggtccatcaacaaaaggaaggaaatgaggctggcatggtaggcagtgtcaggttaccaacaagcctcttccactaagcaaatagaaacaacaaaatatctgcaaattctctacctgtgatgtttgggaaatatcttcagtgacctgggaatgaattttccccatgttgctttaaaaaagttccctttctcccttaactggatagtaatatatcccaggtatcctgggtgccaatgtcatttgggaacttctttaagtcacagcagatattttaaagggtggtgaaggtcactaggtctcctttgaaaatacagaggccctaggcagccattaaggtccttttgtgaatgtcacaagtaacaaatgttcaattgccagagaaaactggaagaccaaatgataggtgcaacctgtagtgatcaaaaggaacatctcacaaatgagaacaaagagaagatgggcaggaagaaggaaagaggaagcacacaatttgaaatggacattgaactggcaacagagctcagcatggtactttgaagatggcaaacatagtgacttgggactaagaagagggagaggcaaaagcccagtcagatgctcacatagaataaataaccaattggcagcatgggccattgcagcacatattagttttctgtgaccactgaaacaaattgccacaaattttaaacagcaatttattttcttgcagttctggtggccaaaaagcaagatatcaacaaagctacactccttctggaagcactagaagtgaatcattctttgtctcttctggcttctggtggctgtcaatactccttagcctgtgtccatatcactccaatctctgcctccatcttcacagggctttctcgtgtgtgtctgtgccttctcctcttctgtctcttataaagaaacttatcattggatttaggaccacatggataatccagaatgactcatgagatccttaacttaggtatagctgcaaacactctttttccaaataaggtcacattcataggttctgggggttaggatgtaaacatatattttgggggccaccattcaacccattacatagtgtttatgtgggggagagatatcctccctttttgtcttcctgattgtaatgttaatatacgttcatcataaaaatatagtgaatatagaaaatcacaaagaaacttaaaactcatctttaatttcacaacccagagtcagccactggtaaaaatttcagaaatcatattccagacttctatgactatatgtactgatttgttaggctcctatggtacttactattgtgaaatctgcttctttcccaattatagacatattgtgaacatcatcccatgcctttaaatctctttccacaacaaaatttttatcagctgcctaatatgccatcacatgtctgtatcatagtttaatgaattggttttgaactgtttgacatttaggctgtccccagtttttcagtgttatcagtaacactgagatgaggacatgcatgccagggtatttaaaagaaaacttgggttgcatgatacaatgggacattgactgtggataccctaaattctctgagttttatagtaaagtgtgcattggactatactgaatcaggcccaagttaggaaaaagatttggcctggaacagagaatcactttataacttctctttctcagaaaaaaaaatacatttattcagcttcctctcttgccactctctgtgttatgctttttattttcttaaaagggtgggagtgacacacctatttcctctttttaaaatgttattaatattttattaatgcctaccatcttgtctggccaagcaaaccatcttactcagtgaagtattaatatagcttttcattttaagtcccatgataaagccagaaaagactagcactagaaaaaaatctacttttattttttattatttctatacctgcactgagaaatatttgtatctagactagaataaatggacaggaggataagggtcatgggtaaactgagtaaatacagcattttagaaaaagctatttagacccctaaataactagaaaagatattcctcagattggggtgaaagggaagcttatgtttgaattataaaaagtcagtacaaacccatctggaaggatcatataatgaggaacacaaacagcctccagaatgttcatcaaagaaaattaatattcgctgagcgtataaggccaacattgcattgccataaggaaatacccaaaaatgggtaatttgtaaagaaaagaggtttaatcagttcacagttctgcaggctgtacaggaagcataacactagcgtatgcctctagggaggcctctggaagtttacaatcatggcagaaggtgaagtaggaacttgaacctcacatggcaaaagtaggaacaagagagagagcaggaaggggccacacacatttaaatgaccagatctcacaagaactcactggttatcacaaggacagcaccaacgggatggtgctaagccattcgtgagaaattcaagcccatgatccgatcacctcccaccagaccccatctccaacattgagatttacatttcaatattagatttgggtggggacacacatccaaactatatcactgaggaagcccattcttgtgaacgtccagcttacgttttgaaactacaagagaagtagaccgttccaatgtacttatatttgtgatttccaggtttactgccacataattttggcccataaagtgaatactctttctgatttgggattgtgcattcataaagttagcaactactaaaaaaaaaaaagtcaatattatagttatttctgtgcctgagtagcacaagtggacaaatctgatgaaatcacagaagtggtgatagcaacacacaacactagtatatagagtttcaagaaacatattggaagtgcatattcattgctcactcagcttgactgactccagtaaatccaccccagtagtgatttaccaaaaaaaaaaaaaaattgatccaatcctggcagaggaggattgttgagaactttgaaagaacacattttagtccaagcaataaatttgttaatagcagattcttcttcttcttctttttttttttgagatggagtctcactttgtcacccaggctggagtacagtggtgtgaacttgactcactgcaacatccgcctcctgggttcaagcggttctcctgcctcagcctcctgagtagccttgatacacagcatgatcccttacccctcagactggccaagaatgagcttctagatttgtcccatttacccatttcgtcattcatcggttattctctatgtccactatcaatgatcttgaaatcaaataggagaggaaacacacaaataaaactaagtaaataaataacactgctaagtatactaagaaaggtaagagcatggacgaggagcaaacacttaccctaaaccatcatcatatttttacttccaaggcactactatttgacttagcatctcagctgaccactcaatgtctaggttcttcccaagctgactacagtgcttaattttttttattttgtgcttactatatgccacatattttacatacattatctcatgtaatgctcacaatcaccatataaggtagatacaaattctatttcatgggcttagaaaagatgagtaaaattacccaagaatttgaacatagtttgtcctaattccaaagctctggtttattctacctcactatgctgactctcaaattttcaaagagatttatagaattaaagtgtacagagtgattgaccagagtgagtgtgctagtccattctcaccttgctataaagaaatatttgacactgggtaatttataaagaaaggaggtttatttcttatttctgagggctctgttctgttccattggtctatatctctgttttggtaccagtaccatgctgttttggttactgtagccttgtagtatagtctgaagtcaggtagcgtgatgcctccagctttgttctattgcacatctacaactatctgatctttgacaaatctgacagaaacaagaaatggggaaaggattccctatttaacaattggtgctgggaaaaccggctagccatatgtagaaagctgaaactggatcccttccttacaccttatacaaaaattaattcaagatggattgaagacttaaatgttagacctaaaaccataaaaaccctagaagaaaacctaggcaatagcattcaggacataggcatgggcaaggacttcatgtcaaaaacaccaaaagcaatggcaacaaaagccaaaattgacaaatgggatctaattcaactaaagagcttctgcacagcaaaagaaactaccatcagagtgaacaggcaatctacagaatgggagaaaatttttgcaatctactcatctgacaaagggctaatatccagaatctacaaagaactcaaacaaatttacaagaaaaaaacaaacaaccccatcaaaaagtgggcgaaggatatgaacagacacttcgcaaaagaagacatttatgcagccaaaagacacatgaaaaaatgctcaccatcactggccatcagagaaatgcagatcaaaaccacaatgagatatcatctcacaccagttagaatggcaatcattaaaaactcaggaaacaacaggtgctggagaggatgtggagaaataggaacactttgacactgttggtgggattgtaaactagttcaaccattgtggaagacagtgtggcaattcctcaggaatctagaactagaaataccatttgacccagccatcccattactgggtatatacccaaaggaatataaatcattgctgctataaagacacgtgcacatatatgtttattgcagcactactcacaatagcaaagacttggaaccaagccaaatgtccaacaatgatagactggattaagaaaatgtggcacatatacaccatggaatactatgcagtcataaaaaatgatgagttcatgtcctttgtagggacatggatgaagctggaaaccatcattctcagcaaactactgcaaggacaaaaatccatgttctcactcataggtgggaattgaacaatgagaacacatggacacaggaaggggaacatcacacactggggcctgttgtggggtgtggggaggggggagggatagcattaagagatatacctaatgtaaatgatgagttaaggggtacaacacaccaacatggcacatgtatacatatgtaacaaaactacacattgtgcacatgtaccctagaacttaaagtattatatatatatatatatatatatatatatatatatatagagagagagagagagagagagagagagagagagagagagaggtttaattggctcatggttcttcacgccatacaggaagcatggtgctgacatctgcttagcttctggggagtcctcaggaagactacaatcacggtggaaggtgaaggaggaagaagaatgtcacatggccagagcagaagtaagagggagggagggaggtgctatacacttttaaacaaccagatcttgtgagaacttactgtcacaaggacagcactaaggcgatggtgttaaaccattcataagacatccaccccatgatccagtcacctcccaccaggccccaccttcaacattagggattacatttcaacatgagatttgggtggggacacacaggcaaactatatcattctgcctcagtccctcccaaatctcatgtccttctcacattttaaaatacaatcaggccttcccgataatcccccaaaatcttaactaattccagcattaactcaaatgtccaaagtccaaagttccatctgagacaaggcaagtcccatgagtcaattaaacctcttttctttataaattacccagtaacaggtatttctttatggtaatgggaaaatggactaacgcagtgggtaagaaggagcccttggattcaatcattaggaaatcatatttgtgtccactgtattagtttgctaggcctgcataacaaagtaccaaaaactgggtggcttaaacagcagaaatttattgtgtcacggttttgaaggctagtaacgagtgatcaaagtgtcagcagggttggttcctcctaagggctgtgaggaaggctctgttccagccctttctcctagtttccaatagcctcaggcattctttggcttgtagattatattctccctgtgtcttcatatcatctattctgtacacatctgtctctatgtccaaatttcccctttttataaagaaaccagtcatattgtattagggcctacctcaatgatatcattttaacttgattatctctgtaaagaccctatttctaaatgaggtcacattctgtagtaccagaggctaggacttcaacacttctattttgagaggacacaattcatctcaaaatacccactgaatgagcactttcagctcagtagtatacatagaaggaagaccaaaaagggataaaggttgagatatgataaggtcatggaaattggctgggagtagggtgctagaagaggctggagaatgttttacaggtgaaaggcaccaggaaaaaaggagaacttcaagatctacagggagaggataattgacagagcacagtcctgaggggaatgagagcagtgaattatcagaaagaaggtaggatgccacttctttggaaacaaaagagaagggaaaagaagctttaaccaacttctatttgtgggaatttctggagctatcttcatcacctcagcccaagtctcattccagattctcgtgaggcctgcctcatatttcttcagtaacttgcagcgttagctttataactttattacagcttcatttgcagctttaaaattctcaggtactgtttaccacttgatacaaagtattacaggatctttctcatagttatttcgagaaaaatgtcagtgggctcaagaatatagcacaacacagaagacaagcaattgaacaaatgaacacacacatataaagagaaggagacaatgtcacacagaacaatcaggtcttgtcactacttaaaccagaccgtagctcattgctctgtgcagctgaggttaagcatgcctgaggcaaaggcctgcaggcacagacagagagaaagcactgaacaagggtgtcaacaaagcatatgcctgagccaagacatgtgacagagaggagccctccatttgcagctgttcacactccaataatgggacactcagaaaacaactacaaaatccctcatcctcatttcctgctagggtaagcaacatttaagtgtggacctaaaaaccttatcatagaatgaacagtttgaataaaaagcatgccatattgcctagagtttcaatatttcaacccagttgtcaaaatctggagcttcttggcaagaggcaagtcctacagacagatgtgaaatagacacttttggaaatggacattttggatatgatgaccctattagccaccagagctccagtgattctggcagggctttttggagttggccctggtgctgctgatctggggagttcatatagcatacctcctgctatcacatcatattcattttggcaaattaaaagagcccattagagaaagttgaaatgctttcctcaggagcttttatcaaattagtgcaaggatacagaatatgaccctaaaacccactgagtgcccagcttgacttctaaccatgaacaacagtaggctcaagaatatagcacaacacaaaatacaagcatgatagcatcatcagtatttctctctcccatcacaatttctcttggactcatacacgtagtatacatttatggaaatagcttatatatagcttacctaaaagcatgcttcattctatataaaatgtgatatcttataagtgagcattcactccacacactttattctttcacaaatttgacagttctcttttgaaatgaaaagctctcataaaccagcaccctttgtgtatcttgtctgtgtgtgtgtgtgtgtgtgtgaatgtgtataacataaccaagagaatattttagtatataaagcaataaaggcctagatttcataaaccacatcccaaaaataaaatgaaaacttcaaaaaccctgacaggttcaaccattaagccctttctgtttaaggcattattcatagaaaatggtttttgaaattttatatcaaattataaatattattatgtagtccaactgttatactacctgttcataactcaaatattttgttttcaaagcagagtttacatgaagaaacaaagcccagaaacaaatcccatggactactaattcaatcagaccattcatggctttgctttctttcttccctcccttcatctccatttgggagctatgaggcaattaatgttgtctctatgcgctctggttaaccacagaagaactcaattcagaaagtccaactgttgctcactcatgtcaattaaaggactctatgcttaaatctgctccaggccatcttttagaaatgaacctttgtggccaaaattatcagatggggaaaggcactgaaaattaattagtgctgttcctaggtatcagcaaggatgttgcagtgccattgtgctttaggaaactcatctgggacttgaagctacactcagaatttgcactatctcacctattttctaaattgattcttacaaatgacagatactggcaggtcacttcatagagggtaaaagtcaaagagcagagaaccaaaaattgggctaaatcttcaattcacaatacacatggccttaaacttctgcttcagaagagatttgtacatcaaggttggctcttcacactagcagagatacggaatcagcctccaaattgtcactgctgacatgacatttaatggtggggaaaaacccaagtgtcctcttttgtgtgacttgttgaatgtcagaataaacgacgttaaatgttccaatgtttattctttcttgcttcacgctaacctttccatctttatcctaccacaccctgctcctcccccctcaaaatcagcaaagaactcaattggcctgtcatgatgatggaatgtaccaatgtcttaattataacacattgtcttggctagaacaaaaagtgtttccattacaatatttgctttgacacactgtcactgcccaatatctcttttccatgttgtagtcaacaaaattgtgaggggattatctctcaccaaattttaaaaataagtgaggaatctcctgacatacagtctactctgagatcccgccaacccagggatggggcaaagcctcatagagtgaacagactcttaagaaacaaaagttgttctcatttactctcaccgccaggcacacacttaagggttcttcaattacctcactggtctctcttttaagtgacctctgctagctcttccttatctccttgaactttaagtgttagagggcaccagggccttgtttttggacattttcccttctctatgctcactcccttggtgatctcatctgtgtcattgctttaatttccatctacatagacacaacttctaaatgtttgtgcgtgtgtggaaagggggatgtgatcttttgaggcccagatatatgcatcaaactgcctcctcaatatctccttttggatatcaataggtgcctcaaatttaacatatccaaaaccaaaaccctgactttacccccaaaacctgctcctcctcaatcttcctcatctaagttaatgataatctcatcctttttgctgttcaggtcaaatccttaagatgatcctaactcctgtctttctctcccactccacaccccatctgtaagaaaattctcttgacaatactttcagaatatatctagaacccggtcatttttcactccctctattgttgccaccctggtttaaccaccatcatctctcccctagattgctgcaaacagcctcctcactggtcagcctcggcccttgcccccttcagtctgttttcaaaacagcagcccgagtgatccccttaacacatctcagatcatatgacgtctctgtacaaatccttctaccggctccccatctctcccagaatataaactctactccttgtactggcctacaaggacctccatgatctggatttccatgtgctctctgaggttgtctcctaccacactctgcctctctcactcagctccaggcacccggcatttcaccaacctggctacatgtaggcccatatcagggtctttgcaattgctattctgcctctcccgaatgatctctccccagatagctgcatgcatcattcattcaactccttcaggtcttcgctcaaatggcaccttcccagtgagtccttccattgccacccaattcaaaatgctacactctcctatataccacatgtgtattacttgtcctactaccatcctttattttactcaatagcacttatcaccaacacactatgtgttgcatttcttgtttaattctgtctcccctgatacttgaatgtacagtctatgaggtcagggatttatgcctgtattgttctctgctctatccctagcccctacaatatacctagcacatggtgagtgctcaataaacatcattacaataaatgaattaaaatcccaaggcaactagtcaattcagaataaaactaaggaaaatctatcaaagtagttatgtattcaattaaatattcattccagccaattattcaattatttgagatatatattcaattatatacattatatatatatatgtgacacagagtgagagaaagaacttaaaccagttagcaattaagcaatagaagcagaaatgaaggtggaggggctgagcagaggtaactccagcccctggggcaccaccaaggcagccaaggtcaattttgtaggcctgaatgctttaaacagtaacttgcaaagtttatgacaaactattattgacaactcaactagccatccaaaaaaggcagattcatccagcctctaactaaaagctttttattttgttgcataaaatggctataatcaattatagatgtaaacaaaattactaagtataattattttttatctgatatttcatcatcaatagaaaaacagacaagtttcttcaggaaaaagataggtcctgtaacagggaaatgtggtttactaatgaattaatgatcacatttgtcctttctactttaaagcctggactttctcatcactcatttccttcacttgagtgaaaaagctatcttcgcaataatcttttttaagttgggaacttcaacttaacttgcatttttaatttttaccttttgatatttttttccaagacatattttaccatgataggatttctcagatgaaagcagagttcaaggtaggttactacacacaagtctaattaaatatttgagaaaatgggtcttttgaaccagcaagagttgaaaattttatttattcattttctttctaatatactaaaattgaaatgtgggggtttgagatgactgaataaatgctagcccaaacatcaactcagcttctaagatggcaaagctggataataacaaaagcactggctagaattcagagtcttggtttctgtacctgtaagactgatagtagctctcttccctgcctctctcaatggattgctgtgaaactcaaatacgaaaacaatgggaatgggctctgtcaatgataaaatgctgtccatgtataagccaaactacggggaagtagggggaacttgcttctacttatttcccaagctgggtgaacaaacagaattgttaaaatgtcaaaacatttggcccccatagaaaataaaatgttttaaaaagcaaaagaacattattgtgttgaatcaataaaaaattccttttatgtttcatctgctatgatgtgttatctttggagacaatatatgatgtttctcttttaaaaatgtcacagcattgaggataataatttctcttagaagatcctttttgaaaaatggccaaacataaatcttttaccctcaatttatgtcatagcaatcgataaccagggtggctggctgacttgtaattggctgtattctacccaaaatgtctcttgattctagaatgcagggttacagcaactacttttacaagaccctgagatacatattgaaaaccagctacctatataacactagtttctaatatgtcaaaaactttatcatctaacttgggtggaacagtgtcctctctcttcccttttatccacatagtcacattatgctgtacaattgtacatcattttttcccagtctcctttgctaatttgaagattcttacatgtggaggctactgagtgattattatcatactctccagttttaattcataaatggattaagaacaacttaacacatttctacagctgaaatgagtgtggttacttcacaagtcatccactgatgccaacttaaaccacaaaaccataaaatgaggagcctaagctttgtgctgttagttacaagacagagcttcagtaaacctatgtaaatagttcagtcagttgtgcctcagcctcccaactctgcagccttccctgatactttctcttgatccctgtattcagaggcaggcaaaaatgattggtaataggtgcaaattttagtctccaccctaatgtgacatgtaattaacagagataagatatttaaaaggttaggtaatatttattttattgagtacctaccaaatgaaaaggacttatagatactgtgtcacttattcattcattcatttattcataaataacttattaaatgttagacaacccaaaataagcaaagcagaaaacgttcctacattcgcgtagcttaaaattgagtgtgagagacagctatttaaacattatcatactacttctgcttccaagtagaatgtaataagtcacagtaaatagacacttctgctgtaataattacttaaatatgaataaattataaaaatggtatttagatgcctgagagagctttgataacaattaggactagatgaattaaatttccatagagtagacaaccattccaagccctgcaccacaaaaaaatataaaaggaatccttgagacagaaaaaaaaagataccagacaggaaaatggaaatgcaggaaggaatgaagaatagaggaatgaactaatatgtgggttaatatcaataaatattaacttcacaaagtaataaaaatactatcatatagaattcatattcaatgacaacaataacaaaaaagcaagataaaggtaaaaggagttttgaggttctaaggttttatattggttatggagatatggctaaataataattttcagtacagtgaaataattcacaaatgcatgctataatctctagagtagcccctaaatgtatagcacaaatatgtataactaacaaattattagaagaaaacacagaacagaacaatgtattttgtaatttatccaaaagacagtaagatgacagaagaaatataaaacagatgagccaagaaggaaatgaaagacaacgtggtacatataaactcagctatatcagtaattacaatgtatttaaaagaactaattactccaaataaaagactaagattacaaaaccagacaaaaaacaaccaaaaccaaaacacaactatgtacaatgataccaaaacaagacacaggtatcacaaaaaataagatgacagaccaacatattttatgaatttagatgccaaaattctcaatgaaataccactaaaacaaattcagcaacacataaaaagaactatgtaccatagccatagggaatctatcttaggaattctagctgatttggcatatgaaaatcaatcaatgtaatataccatataaatacaataaaggacaaaaatcacatgatcatctcaatagatgcagaaaagcatttgacacaatccaacactcattcatgatgaaaacactcaacacagtaggaatactaggaagttttctcaacctgaaaaatagcaatctatgaaaaacctacagccaacatcttactcattagtgaaaaaaaaaataatgttttctccctaacatcagaaggtagataaggatgtccactctcatcacttttactcaacattgtcctggagattctagcagggcaattacacaagaaaatgaaataaaattcatcaagttgtagaggaagaaataaaactgtctctcttcagagatgacacaatcttatacatatagaggaaatcacaagaaatctcctcaaaaatctattagaactaataagagagttcagcaaagttctagagtataagatcaatatacaacaatccatagtatttctatacattaccaatgcacattatgaaaatgaaattaagaaaattccatttacaatagcatgaaaaagaataaagcacttagaaactttttaaaggaatgcaatatttatatattgaaaactacaaaatattgttgaaagaaattattaaagaagacctaaataaatggaaagacatcttatatttatgggtttgaaaaattactattgttgagatggcgatactccccatattgatctacaaattcaatgcaatacctttcaaattcccacctggattttgtgcagaaattgacaaactaatcataaaatttatacagaaatgcaagagactcagaaaaaccaaaacaatctcaaaaaaagaagactcattctttcaaatttcaaaatttattacaaagctatggtaattaagacattgtgagtgacataaggatagacatacacctcaatggaatagaaataagagccaaatagcttggcagttcctcaaggtattaaatataaatttatcatataaccccagcaatcctactcctagatatatactcaaagacattgaaaacatatgttgacatgaaacctttacataagtgttcatggcagtattattcataatgaccaaaaagtggaaacaacccaaatgtccatcagttaatgaatggataagccacatatgttacagccatacatgggatggttttcaacataaaaaaatgaaggactgatatatactacaagatggatgaaccttacaaacattatgctaattaaagaagctaaacacaaaagaccacatttgtataattctatttatgtgaaatatccagaataggcaaatctctagtgacagaaagtaaattaatattttctggggtcttgggatgagggggaaattggatgagaataatggatatctttgggtgataatgaaaatgttctaaaattagatagtggttacaactttgagaataggccaaaaactattgaactgtccacttaaaagtatggaaattatatcttggctgagcatggtggctcacacctctaatcctagcactttgggagactgaggtgggcaaatcacctgaggttgggagtttgagaccacctggccaacatggtgaaacctgtctctactaaaaatacaaaaattagccagatgtggtggtgcacgcctgtaatcccagctactcgggaggccaaggcatgagaatcacttgaacccagaaggcggaggttgcagttggctgagatcgagccactgaactccagccttggtgacagagcaagactcttatctcaaacaacaaaaaataaaaataaaataaaatatagttaactttattattcttacaagagttaattttttaaaaaatatataagggcacagaaaagtccaaagtaaaaggataaaaaaattaagtaattcaaacattaaccaaaagaagcctgtcataactatactgatatcaggcaaagtaaattttaaggcaataagcattattatagataatagaacaacattttataataagtggtaaaaacttttcagtatcctcaaaatgataaggaagtcattatcttcaacaagaagatattattatcctaaaactatatacacagaataatatggcctcaaagtatataaagcaaaaaaccaacaaaactaaaagcagaaattgacaactctccaatcataaaggaatattaacacacttatcttcatagctgatagaacaggcagaaaaaaatcagtatacatataaaatttctgaagaacataattaacaaacttgatgtaatattcatttatagagcactgcatacaaacaagccacaatccacatttttcatgtcacagagagtatttatcaaaatcaattatatgaagaaaacctcaacaaattttaaaatattgaaatcattcagagtgtttttttaaccaaaatagaattaaaacaggaattaacaacagaaagataactaggaaaaacaactcaactgaatgaaagttatacagtacacacaaaacaactatcaccaatgggtcatgttagtttaagtataagttcaagtctttaagtctttgctattctcctttgagtctgttttgtaacaatgtggttcaggggtcagcctgagactttcacgatgtttacacacaggattaggagatctccttctacagcactctaccctctgggaattatccttcactctccagacatgcttacctgggtttcgttccctaattctcctagccaggaaggcagcaccatttctacttgagttttagctgcctttactgtcctgcctcactgaacaactgatgcctgctcttggatcaaagccacaaaaaacaaaaataccacaaaatgcccacgtccattatttcaagtttcagttctccttcacagtttgcccatctgtactttctcctcagtatcctcaggtagttatctttgtattttgcccagagtgaagagttaccagtgggagagttgatctattggggagttgatctattgatctataacaggagctagagggcctgctttgtgattttaatttacatttatctgatgacaatgaagcaagatgactatggctttctcattagaaaatataaaaatataagatagtggaatcgcatacctaaagtgatgaaagaaaaaaagttcatccagaattctatatctaataaaaatatccttcaggaatgacagtgaaatgcattttcagaaaaagaaaaactaagaaaacacattatggtattcttcagactaaagggaaataataatagagagaggctttgaatttttaatgaaaataatttaaaatgatttagttcttaaattctttaaaacaaacattgtttgaagaaaaagcatagcatttttttgtgaggttttcaatgtaggtagatgtaatacatatgataattataacataaaagatgacagtgggggttaaagggacctataggatttaaaagttcttacattttccatgaaatgatacaatattcattctaaacaaaccggtaaagtttagggagatatatatatatatatatatatccatatatatgtatatatccatatatatatatccatatatatgtatatatccatatatatccatatatatatccatatatatatcatatatatccatatatatatccatatatatatcatatatatccatatatatccatatatatccataaatatatacatatatatccatatatatccatatatacatccatatatatccatatatatacatatatatccatatatatccatatacaaccatatatatccatatatatccatatatatccatacatatagccgtgtatatatatccatatatatagccgtgtatatatatccatatatatagccgtgtatatatatccatatatatatccgtgtatgtatatccgtatatatatatccgtgtatgtatatccgtatatatatatccgtgtatgtatatccgtatatatatatccgtgtatgtatatccgtatatatatatccgtgtatgtatatccgtatatatatatccgtgtatgtatatccgtatatatatatccgtgtatgtatatccgtatatatatatccgtatatgtatatccatatatatccatatatatatccatatatatccatatatatatcgatatatatatatccatatatatatcgatatatatatatccatatatatatcatatatatatccatatatatatcatatatatatccatatatatatcatatatatatatccatatatatatcatatatatatccatatatatatcatatatatatatccatatatatccatatatatatatccatatatatatccaactagcaactagcaaatgcaactatatatatatatatatatatatatatatataatttgctagtacaaccactaaaaatagtgtgagggtagtgttaataggataaaacaaagattcaaagagactgatcaatttgcccaaggtcatgtcacagctaagtggctgagctaagatttgaacccagattatctaattctaaagcccatgctctgttcgtgactacaggctgcctcttcaaactttgagtgtaatcaaacccataatctttgagtttctatgcactaagtcgccgaaccataccttaatccaagaactgaaactccactatttgtctcataaatatcaaccagctgctgggcagactattggtcagcagatgtcctcttgatgccctgatacatgactttacatgtgagaaacagctcctaacattctagtcataaaatataaaatatcatatatatatacatgtatatatgtgtatatatgtgtacgtatatacgtatatatgtatacatatatacacatatatatgtatgtacacatatatatgtatatatgtgtacatatatacgtatatgtgtatatatgtgtacatatatacgtatatatgtacacatatatacatatatgtgtatgtatatgtatatatgtacacatatatacatatatgtgtatgtatatgtatatatacgtatatatgtatatatgtgtgtatatatatatatgctttcattagcatttcagaattgaaaactatgagcagctgagattaggagagctggctccaggctttaaggaaagtgtgggtaaaggaggctgtagactggtagaagagggtttagaggaaaattgatgggcaggtggaagaaaataaggcaaaattctaatcatatggcctaattggggcagttcacctcagccataatgaatacaggccctgggaataaaaggagatccaagccttccctgatggtagggatgagacgtcctaatatcctctctgcctcagagctggttggggtaagtacacaggttggatcctggagaaggcagagactgacagtcagagctttccctgaacagagagaatgttcagtagtttattgcacagaggaaaataatatggtctccctgcagagtttgatgtataggaatggaacaattctacgacctactattttgctcctataacataaactcatctctaaaaatcatctcaatcatttctaagacacccctccatcacttcttgtgcctgcttctcttggagaaatgcagaatgttttagagaatatcaacagagagaacgctgaagtctttctgtccccaggctagccaagtcccagagaaaagtagaagggatgagattaaattctgccagcaaatcccctagacatcattcttggcatgagcttctcttgcccagccctgcacaggctggttctttgggctttcatcttctgagtatactggcttgtcttgctaaccaggaggccatttgacagccataattatttcccaggtatattgcagcatgacggtttatttattttgtggatggctgagccaaatctgggaggataagtctaacaccatttcttcgtaatagctcagttgttccaataccattttcttctcaacctccaaaatacaggttactttatttatttcagtattctttgtgcatttaaccaccattctcattccacaggctttggtgaattaaagtaactacagttaccaactctttttattgaaaaactctttatgagttgattgtaactgcttctccaattataattgcttcctctccacaggcctcgctattcaagactctgagttaccttgatcatgaaacttcaatgtggaaatttcccaagaccatattctgaagtagcctttttaaccctgagagtgcttttgagagctgtgtccacattaaattctgaaccgtccttttatcccatattgcagccacagagatcagactggtggttgacagagatttaatcagagcatttaatactctcaaattcctgccagttgattgtgtcactttatttaaaaatgaacaaagcagttagaaaaaaaagttattatagtccttggaaattttcagtcacaaatcaaaactctctgtagtgggaactatggatggattcacataaatgatggtttagtgtatgggggatattatatctatggtgcaacatatgcgggaggcacaaaagaacctcagtaatctggtcatacaattacagaaaggaagcaggctggagttttaaaagcataggtttcggactcagacaaacctggatcacagttctgccatttcctagttgttactttgagcaagttacctcatgtctttgaggcttaatcagttcatctataatgtgggaaaagcaaaaataccaaatttacaatgttgtaaggatgaagacagtaaggacgcaaataacttgagaataggctctggcagatgaccaaagaagctctgctgatcagaaatattttgattattcccagactctgctgtcagttaatcacacatcctctattccagtcaacctctgctacttgaaaggcaggatattggtggtggtggtggtgacagtgacagcagttaccctttgttgatctctttctatatactgctctgctaagtaccttacatgcactgttttacttaatttcacttaatcctgacaaccactctatgtggtaagtgccaacatagtagctaaccacaagggttttgcaatcagaaagatctgggtttgaagtgtggctcccctactcagtagctgggtgactttggacaagccatagaacctatttcagtaaacagagtatcaatttccccatctgtagcaaaaatatacttcttatttcataggctgttgtgagaatttaaggggatagtataaataaaattcctggcacgtaagaggtgttcaatgttagactacttccttctctccctgtaagttagtacaaaaagggcaaatgaatgagtttatatgttaccttatcatgctttaaatctaaacatttcaccaaaattcataggaagaaatatagtaaagaaataaactgaaaaatcaagccatcttggaagaaagctgaaaggatatttttatcttagctttttccaatattactcctaaaaacagtgctatttttatttgaatgtagtgttatttctcagttttatttacttgacagctgcttcgatagttcttcactggggtcatgtttactgaaagaaagcatattgtgatatttgaataagccattttagaggctccattttgaccaaatataaacaatatagatgtcaggcaagcagagtcagaaatcaatctagcagcaaactccatcttaatggcaacacacatcaattgtcaattcccagaaacactctaactgccctcttaccagcaagagacagggctccactctgtgcagaactttcacaagctgcccctactacaacacgcaacgtgctcagtgttcataacttcccaccctcactcactctgtacctttttcctcactctgatttctttcatccactgaccatcaaccatttcatctctaaatcactcccttagctggacagataatctagtccatccagacatattactttggcttcctcctgctcaaatggttctatcatctccccacctagcccatgctggtaacacagattaaactcttcttaaattgacctggctccatagaagacttcggcccacacactgtcactgccagcagcttcctaaacctgttctaccacagccttgtatacagccctgcattgacaggtgtgagtaagagggatcagcaacccaacagtcatccctgacaaaagcctgaacttgaaggcaaatgggattttcatggaacaaacctttcttctagggtccctctggtacgggagggtggcagggaaatgctgggaaaagaaaggtggggtccttgctagggctccacctctgggcctgtgcccatgggcctaggtgaggacaggcatttctgtttttgtgcccaaatgttgcatttcccaagaccaccctggcctgccacgcccccatcctgtgcctataaaaatcctgagaccctagtgggcagagacacaagcagatggacattgagaggaacacaccggcagaagaacacaccagcagacaacagcaggccaccaaccagctggggcggtaggaggagagcttccaccattcaataaaaccttgcactcattctccaagcccacgtgtgatccgatttttccagtacaccaaggcaagaacccggtatacagaaagtcctctgtcattgcgataaggcagagggtctaattgagctgataaacacaagctacctataaacggcaaaactgaaagagcatactgtaacacacgcccactggggcttcaggagctgtgaacattcacccctagacactgccgtgaggtcacagtctcacaacctgccggtctgcatgcttcccctaaaggcttgagtagcagggcactaaagaagcaagccactccccctgtcaaccaccctgcgagagggacaagggagctttttccttttcacctctctctgtttttcatcccacttcttgcattatcccagtggtagtttcttttaagatcaatctccactattgccctaaattaatgttccctccataagtcttctttatcagtacctagctattcggattggcactcccattagccaaggcaagtgactgcaacaaaggaaacatctttctgagttgctaccgagcacaccagtattttcatcagattcagctgaatggcacaacatccacctttccacttaggaaacatgtgttggaggctatgggcacaattacagtgtacactttgagacttttgtagcaatcaaacaagttatttatactcctccttgttaccaaaaaaaaatgtaaggtagcttactgtaaataatgtgtacacatgaacatacagtgtggaatgagagacaatggagactccatctaatgggttgggagcgggaagggaagtgatgatgagaaattacctaatgggtacaatgtgcattatttgggtgatggatacgataaaagccctgactacactactatgcaatatatctatgtaacaaaattattcttgtaccccataaatttatacaaattttttaaaattgtaaaagaaaaaacaatatgtcaggaaatcaggggaaggtgaaaataatggtagaaaggttcaaacagggacaggagaaaggttagtacttaaaatgtctactggaagtccaaaacattggctaattggtgagctacaaatctggccagtgtgaagaaggaaaagcagttacatgatttacaacgcctataggaaataagccaaacaagagaagcatgggtattcgtgggtaccaagacaagacatcacattacattatctacaacaacatagttcatagggctatttcctctatgatccctcctataggccattggcttcgaggcaaagcacagtccagcttctacagtgagccagagttacgggatttagataagcagctctccaaaggtctggcttaatttagagagaggttttagaatttttgtaggaatggatggataacaacatttgggtgatcctccctaaatatggtgcccacaactgagttttggattttagcatcaggaggtccttgaaaatgttgcttgacaagtcactaaaatggagctcctttagactaccagtgaagaacagaatcatgtcatttagcagtgagtctagctgtagtgaatcaaatactcatgtcagtcatttaaaaaatacaaaataatcataaaatgtctaacataaaacaacataatttcctggtacacatttttaaataaatcacaagtgtaatttataaaataaatcctaaggtcgcctccatgatgccctctttctggtatccacactcttatataacgccttccctctgaatgtgggtaggacctgtgacttgcttctgactgacacatatggcaaaagtgatcttactctggtgatcaggttacattgtataccacttcattttgttagcagtctgtttttacagacgccttgctggttcgataaagttaagtgaccatattggggaagtccacatggtaagaaactatggatgatttctaaaaactgtgggcagcctcttggaactgaagacagcctccagccaacagtcagcacaaacctagggcccactgtactcttaaccccaagagaatgaattctgacaaccacctaattgagctgggaaggagattcttcttcatttgagtattcaaattattatacaccctgactggtaccatgagtgtagccttataagaccccaagcagaggacccagttaagccacgcctatattactgatcacaaaaactgtgaagtaataaatatgtgttgttttaagccactatgtttgtaataatttgttgtacagaaataagtacccaatatggccaggcactgtggctcatgcctgtaatcccagcattttgggaggccgaagcaggtggatcacttcaggtcaagagtttgagaccagcctggccaacatagcaaaaccccgtctctactaaaactacaaaaattagctggacttggtggcatgcacctgtaatcccagctactcaggaggctgaggtgggagaatcgctttaacctgggaggcagatgttgcagtgagccgagattgtaccactgcactccagcctaggagacagagtaagactccatctcaaaaaaaaaaaaaaaaaaagaaaaagaaaagaaagaagtacccaatacaagatagatttgttctaaaatgtgtgccaaaatagagatatagaccaatggaacagaacagagccctcagaaataatgccacacatctacaactatctgatctttgacaaacctgacaaaaacaagaaatggggaaaggattccctatttaataaatggtgctgggaaaactggctagccatatgtagaaagctgaaactggatcccttccttacaccttatacaaaaattaattcaagatggattaaaaacttaaatgttagacctaaaaccataaaaaccctagaagaaaacctaggcaatagcattcaggacataggcatgggcaaggacttcatgtcaaaaacaccaaaagcaatggcaacaaaagccaaaattgacaaatgggatctaattaaactaaagagtttctgcacagcaaaagaaactaccatcagagtgaacaggcaacctaaagaatgagagaaaatttttgcaatctacccatctgacaaagggctaatatctagaatctacaaagaactcaaagaaatttacaagaaaaaaacaaacaaccccatcaacaagttggcgaaggatatgaacagactcttctcaaaagaagacatttatgcagccaaaaaacacatgaaaaaatgctcatcatcactggccatcagagaaatgcaaatcaaaaccacaatgagataccatctcacacaagttagaatggcgatcattaaaaagtcaggaaacaacaggtgctggagaggatgtggagaaataggaacacttttacactgttggtgggactgtaaactggttcaaccattgtggaagacagtgtggcaattcctgagggatctagaactagaaataccatttgatccagccatcccattactgggtatatacccaaaggattataaatcatgctgctataaagacacatgcacacgtatgtttattgcggcactattcacaatagcgaagacttggaaccaagccaaatgtccaccaatgataggctgaattaagaaaatgtggcacatatacaccatggaatactatgcagccataaaaaatgatgagtccatgtcctttgtagggacatggatgaagctggaaaccatcattctcagcacactatcgcaaggacaaaaaaccaaacaccgcatgttctcactcataggtgggaattgagcaatgagaacacttggacacaggaaggggaacatcacacactggggcctgttgtggggtggggggagaggggagggatagcatcaggagatatacctaatgtaaatgacgagttaatgggtgcagcacaccaacatggcacatgtgtacatatgtaacaaacctgcacgttgtgcacatgtaccctaaaacttaaagtataataaaaaataaaataaaataaatttacaactgtagacatatttgtctacagtaaatataagactaaacaatcagatactaaatcattaaatgattatcagttagtatctttaattttcttatacttctatattttctatagatcatctttgtaacaaaaagaaaataaaccaaatgaaaatgaaatgaattctctcaaaaagaattaagacaggaagaagtctcacaaagtaatgtaaaatgtatcttatggtttatgtaaaattcttaataaaagtaccttcttttctccaaaaaaaatagtccattggttaactataagccaattaaatggtatggcccacttaccaaaaaataaatctttggtttgagaatagaacacagaaaatctctccagatacaaacagatagcagggctagttgattattaaaatctcttctggtttctgccaatacaaccatttcatctactttggctgtgtccttggctgtgtgcaaagcaccattactgggcttcaagagagcaagaactggaattaaagcctagatcacatgacctcaaaaagcttacaagctgctcagggacaccaaacatatatatgtgaaacaacttacaacaaacaccaaataacctatcaattttattcacacaaactaacgaagatgcagggaatccaattagacatatgataggcatttttaaatgcatttacattcagctttaggtgtataggtgttttgggtgcttatatttgatcgtggatatgcctgctgttctgagattttacctcaaaataaacagaaacgttgtgcgcattatcccccattcttccattgaaaaggagcaggctggttctttcatatcaattgatgcaaggtttgtcttttctctcccctgccctgaaccaaaggagatacgttgagggggaaacagaggttcagtgaacttttctacttcctcagtgccactactatatctgagtacattagctctagctgttttattcttaatttttaaaagttaaatactcactacaaaaaaaaaattataaacaggaaaaaaagaaatgctaaaaacctgtaacccagcctcagaggaaaaaaaacactgaaaattttgggttaacttactataagtgtacatgtatgtattaaaattaacccatacacacacacacacacacacggtgaatataattatattaacatgctgattttttccctcacttagcaattgtgagcatcttttcgtatcaaatattctttcctattactgcaatttaaatccaatttaaattgcatattttaagcttccttgaaaataaagcagatgttccagtttagaatcattgtaaaccatattatttttcaggtctagttcatttatttgtatacattgattgaaaccataattcgcatgccatgctattcaccaatttaaagtgtacaatttaatgatttttagcacattcacaaaactgtggaaacattactacaatattttaaatattttgatcaccaccaaaagaaactctatatccattagcagtaacccctcatttcccccaaccttcccacaaagccctcaataaccactagtccactattttgtctctatagatttgcctcttctgacacttcacatgaatgggatcatacactatgagcctcttgtgactggcttctgtgagttagcataatgttgtcaaggttcattcatgttgtagcacgtataaatccttcattcctgtttatggctgaataatattccattgtatggatataccaaattctgcttatctatgcatttgttgacagacacttgaattgtttacactttttggctattagcaataatgctgttatgaacattcatgtacaggtttttgtgtagacctgttttttgtttttttttgtttttttttttttgagacggagtcttgctctgtcacccaggctggagtgcagtggcgcaatcttggctcactgcaagctctgcctcccgggttcacgccattctcctgcctcagcctcccaagtagctgggactacaggcgtctgccacagcacccggctaattttttgtatttttagtagagacggggtttcaccatggtctcaatctcctgacctcgtgatccgcctgcctcggcctcccaaagtgctgggattacaggtgtgagccaccgcgtccagccctgtgtagatatgttttcatttcttctgagtatatacctaagagtgtaattcctgggtcacaaggtaactctgtgtttaacattttaatgaatcatcaaaatgttttccacagtaactataccgttttactttgccaagagcagtgtagaagggttccactttctccacatccttgcctaatatttttcatcttgttgattatagtcatcctagtaatccattttgcatatagtatgagttagggattcaacttcattcttttgcatgtagaaatctgattgtcccagtactgaaggctattattttccccctttgaattatcttgatacccttgtcaaaatcaatgaccataaatgtgagagtttatttatagactccattttgttacactgatccatatgataggctgaatattggcccctcaattatgtctacttccaagttcccagaaattatgaatatgttaccttatatggcaaaagagactttgcaaatgtgggtaagaatcttaagatggggagatattccataattatccaataggcccaatgaaattataagaattcctataacagagaggcaataagatcatactcagtaggagatttaacgatggaagtaagagtttggagtaatgcaaggaaggggccatgagttggaaatactggcagtcgctagaaaccaaaaaatgtgaggaaatggaatgtctactctgttctttcagaagaaactagccctggcaacaccttgactttagtccactgaaattgattttgaacttctgacctccagaagaagaaaataataaatgtgttattttaagccaccaaatttgtggtgctttgttaccacagcaacaggaaactaatataatctacatgtctagccttataccaatactatactctcttgattatactagcattgctgtaagttttgatgtcggaaaacataagtcctccaacttcattcttcttaagtattgttttggctattctggcaaaccatagcatgttaatggatttatattctattgtttgttaccataatttatttgaataattcttattgttggatatttgggttgttttgaaatattttgctattataatgactgcaataaatatcctccaagatattttctgtacttttataattattgccttgatgtttatgtcaaaaggagtatatttttgaagcttttggtatggcctcaatgatctccagaactgtatactccaaccaacagtatatgagagtgctcattttcctacactctcatcaaccctgttatcaaattatagacaaattttacattaaattatacatttagatgtgaaagataaagctataaagttagtataaaattttaagagaatatctttatgacctagaagcagtgaagtacttcttaaataaaactttaaagacacagactataaaagcaaaaactaatgaatttaataaattccaattgagagtttctattcaacaaagtataagaaaaacacagacaaagttaattgacatgtgacagattaggaaacattatttgtaatgtctaaaactgacaatgaattaacatctggaaaactcaagaaaagccttcaaattaacagccctggtagaaaattaggcaaagcctgtgagctgacaatttacaaaaagagaaacccaaaattctgaaaagcctatcaagatgtattctaaaatgcaataaggggatatcatttaaaacagattgcactttacttatgttaaactagcaaaacttataaaggaggataatgcaaataattgacaagaattacagtacagaaatctatatgcactactggtgggagtgtagattggtgcagccaatctggagacaaattggtggtgtctagacaaatcagagatatgaataccccaacatcatggtattatgttcctgtacataaatcccaagtaagttatcacaccactccataagggtactgataagaaggcattatttgtggaaacaaggtgttttaggcaacctggatgtcatttactggcaaagtagttaggaaaaaaatgtggtatctgcacaccaggcagcagttaggagcactagactggatatgtctaaggcaataaaaatatatcttaaaattatggcactgattttaaaacttaagaaaaacaatgagatatataataccatcccattcttataaattaaaatatatgccagctaaacagagtggagagttcagaaagaaatccacatgtacagagccaattgatttttgagaaaagtggcaaggtaatactaggatcaaaagacagacttatcaattaataattctgggaaaattccaaatccatataaaattaaaaacctcaactattacctcatttcatatacaaaaattatccaagatatatgatagtctaaaacataaatgctaaaactataaagcttttataaacttgattaatgttctaaaagtggtatgtgttggccctctcagaggcatggacaattcaaaaacatttcagaaagaaagctatgcttagcacaacttaaacactaatgatggagtaatagttttctattgctgtgttctgtaagttagaagtataagctggctcaagtgagagctcagcttaagatctcacaaggttgaagtcaagatgtaagcctactgggctcctgcctggaggccctagaaaataatccacttttaggctcattaagattgttggccgaattaaatttcctgctagctgttagccaggggtagctctgagctcccagagaccaatcttcagtcctttcacgtggccccctccatcttcaaagtcacaaatgctttaccaaatccttcaggtactttgcgtgtctctgacttctctttctgctatcagctgtagaaagctctctgcatctaaagaacacacctgattgtgtcggcccacatagatattctctatatcataacatcaactaacttggaactttaattatcaaactaacaccaaaaggatctgataattaaattggaattatggcccagaaaattaggccaggacctgtgtgttaaccctaaaaagggttactgcccgctaaataggatccagagtctgctaacacactttacaaaatgtccagaatacacataacaaccacctttcatatcaagacgcaggaaaatcacaattgtaataaacagagatagtcaaggagagtcaactttgaaatatcagatgtccaaatgatctgcaaggatattaaagcagccatcataaaaatgtttcaataatcaattacaaattatctcaaaaattaaaaagctggaaacctcagcaaaatgtagaagttgtttttttaaaggaagaaaatggaaattataaaactgtaaaaacaatagccaaatttggaaaaaatctctggatgggctcaatattatagtgtagctaagcaaggatacaatcaacgaacttaaagagagttctgtacaaatctgcttaagtgttgggggaaaggcttatggggtgcctgtataaactggccataaaaatatgggacaataagttgtggaaagccacaagaggcctctgaggaggaaagcctcctaattgccatcatgtttccatggtcagagtgagacccactctcttatctgtaaacactgtgttcaaggagaaagacactcctttaaagcattggaatgtggacaaatatgcaggctcctagttaagcccgctcccaccagctactctctgataagttaaagatatactgtttgaacacaaagaagattcacttaaaccaccactgctataaattacgcatatgacacactgcctccctttcactgttttgccctgaacatctgcttcttaaatctaagtaattgtactgaataaataatgtggagaccagagctctgagccttttgcagactccattttacaattggccccctggcccccactcttaacctgtctcttctcattccttcatcgccactggactttgggtaccctatgggtggtgttgaggctggtcccaacacttaagaacagagaaaaagataataaagactaataaaagtgaaagagactaaagaacccgtaagacaataaaatagatgcaacatttatatcatcagtgtcccagagggagaagaaaaagaaactagtggcaaagaaattatgctgaaatttttcagttttggcaaaagacacaaacttaaagattcaaaaagtttaataaaccccaagtagtataaacacaaataaatgcataccaaaacacataataagtatgcttctgaaaagtcaaaaaaaaaatcttgaaagcactcagtggaaaatgacacattacctatttgaatttgaatgagtatcaatttctgatctgaaatcatggaggtctgagggaagtggcacatttttcaagtactgaagaagaaagaaggaactatcgaccacaaattatatgttcggtgaaaccaatctttaggagtgaaagggaaatgaaacattttcagacaaagaataatgaaaataatttgttgccaacagacttatctttaatgagtggctttaaaaattcttcaaaaagagggaaataataaaagaaaaaatcttggagcattggataggaagatggaacgagcagaggtataaatataaatggtctaaatgtaccaatcaaaagacagaaattgacagagacattaaaaaaatatgactcagccatatgggtggcacatgtctacagttccagctactcaggaggctgaggcagagtggtcacttgagcccaggagtttgagactagcctgggcaacaaagcaagtctctacctccaaaataaataaataaataaataattttaaatgaacataagtgggatgaaagcaaaaggatagaaagagaaaaatatatatcatgcaatcattgatagtaaaacaagcaaaacacagaagtagctatattaatatcaaataaagtcaacataagagcaaagaaaattactaaaaacaaagagggacataacaaacataaaaggatcaatctaccagggaattataatgaccctaaatgggtacacactaaataacagcgtttcaaaatacatgaagctaaatctgatagcgctgaaagaataaataggcaaatccaaaattataggtgggaacttcaacactgccctgtcagcaactgatagaaatactagatataatattagcaatacagaagatatgaataacacaatcaacctacaggatagaatcggtatatatacaatgctcccccacccgccccccaacagcagaatacacttttttttcaagagccacataagattcacaaatacagaccatatcctgggccataaaagaaacttcaacataagaaaagaactgaaattatagtgtgttctctgacaataatggaatcaaactagaaatcaatattggaaggatgaaatgaaaatatctaaacacatgaaacttaaactaacttttaaataagccatgggtttaaaaggaagcctcaaaggaaattaaagaaaacattgaactgaataaaaatgagaatagaacatgtcaattttgtgaaatgaagctaaagcaatactgagaaagaaatttagagcagttaatgctcacattagaatgacagaagggagggagggagaaaagggttgaaaaactattgagtactatgttcactaattgggtgatgagctcaatagaagcccaaaccccagcattacataatataccaatgtaacaaacctgcacatgtacccccgaacctaaaatttttttaatgctcattgtatttttaaatacctcattaattacttgtgaaggacattggcaaaacacactatgaaaatggagagttataggacaatcaggaaatcacaaccaaatgaacattgattggatatttgatggtattttggaatcattttcaatttttttacaatttcaacttttatttcagattcagggggtacatatgcagatttgttacacaggtatattatgtgatactgaggtttggaatgcaaatgatcccaccacccaggtagtgagcatagtacccaacaggtggtttttcaacccttacccccttactcaccctctagtagttctcattacccattattgccatctttgtccatgagtacccaatgtttagctcccacttataagtgagaacatgtggtgtttggttttctttttctgcgtttgttcacttagaataatggccttcagctatatccatgttgttgcaaagaacatgatttcattctttttatggctgcgtagtattccatggtgtatatgtactacattttctttattcgatccactgttgatagacacttaggttgatttcatatctttgctactgtaaataatgctgcaatgaacatgcaagtgcatgtgtctttttggtagaaagatttatttcttttggatatatatccagtatcaggattgctgggtcaaatggtagttctgagttccttgagaaatctccacactgctttccacagtggctgaaccaactcacattcccaccaacagtatataagtgtctccttttctctgtagcctcgccagtatgtgttggtttttgactttttaataatggtcactctgactggtgtgagatggtatctcattgtgggtttgatttgcatttctttgatgattaatgatgttgagcattttttcatacgtttgtcagctgctaatatgtcttcttttgagaagtgtctgtccatgccttttgcccactttttaatagggttatttggtttttgcttgttgagttgtttaagtttcttatagattctggataaaccttacttggatgcatagtctgtgaatattttctcccattctgtagattgtctgtttactctgttgatagtttccttttgctgtgaagaagtggattgctcctgcaggaccttgggagacagcattaaacaaccaaaactaaggaccctcatagagaccatttcactctcctgcctcctccacgagagcaggtgctggtatccatggctgagagacctgaagacaattcacatcaaaggactctgtgcagacaatccccagacccagaccaaagtctggtagccctgctgggtagctagatccagaagagaaataacaatcgctacagttcagctatcaggaagccacatcccaggcaaaagggggagagtactacatcaagggaacagtccatgggacaaaagaatctgaacagcagccttgagccccagatcttccctctgacatagcctacccaaatgagaagaaaccagaaaaacaattctggaaatatgacaaaatgaagttctttaacaaccccaagtaatcacactagctcaccaacagatccaatggatccaaaccaagaagaaatccctgatttacctgaaaaagaattcagaatgttgattattaagctaataaagaaggcaccagagaaatgagaaaaaggcacaaacaatttaaggaaattaataaatgatacaaggtatgaggggagaaatcgtcagtgaaatagatagcataaataaaaaacaatcacaacttcaggaaataaagaacacacttagacaaatgcaaaatgtactacaaaatctcagcaatagaattgaacaagcagaagaaagaacttcagagttcaaagacaaggttttcaaattaacttaatccaacaaagacaaagaaaaaagaccaaaaaaactgaacaaagcctccaagaagtttgggattatgttaaacaaccaaacctaagaataattggtattcctaaagaaaataagagaagtctaaagtttggaaaacatatttgggagaataatcaaagagaaacttccctggccttgctagagacctagacatccaaatacaagaagctcaaaaaacacctgggaaattcattgctgaaaggtcattgcttaggcacactgtcatcaggttatctaacgtcaagatgaaggaaagaatcttaagacctgtgaggcaaaagcaccaggtaacttataaaggaaaatctatcaggttaacaacagatttctcagcagaaaccctacaagctagaagggattatggccctatcttcagcctccttaaacaaaacaataatcagtgaagagttttgtatccagcaaaactaagcttcattaatgaaggaaagatttagtctatttcagacaaacaaatgctaagagaatttgccactacaaagtcagcactacaagacctgctaaaaggagctctcaatcttgaaacaaatcctggaaacataaagaaaaccagaacctctttaaagcataaatcttacaggacctacaaagcaaaaatacagaaaaaaaacaaggtacacaggcaacaaatagcacaatgaatagaatagtatctcatatctcaatacaagccttgaatataaatggcctaaatgctccacttaaaagatacagaatttcagaatggatgagaattcaccaaccatatatatcctgccttcaagagactcgcctaacacataaggactcacataaacttaaggtaaaggggtgaaaaaagacattccaggcaaatggacaccagaaacgagcaggagtagctattcttatattagacaaaacaaactttaaaggaacagcaataaaaaaagaaaaagagaggcattatataatgataaaacgccttgtccaacatgaaaatatcgcaattctaggccaggcacggtggctcacgcctgtaatcccaacattttgggaggctgaggcaggcagatcatgaggtcaggagatggagaccatcctggctaacatggtgaaaccccatctctactaaaaatacaaaaaattagctgggcttggtggtgggtgcctgtagtcccagctaattgggaggctgaggcaggagaatggcgtgaacctgggaggcggagcttgcagtgagctaagatcgtgtcactgcactccagcctgggtgacagtgtgagactccatctcaaaaaaaaaaaaaaaaaatatatatatatatatatatatatatatatatatatatatatatatatcacaattctaaatatatatgcacctaacactggagctcccaaatttataaaacaattactactagacctaagaaatgagataaatagcaacacaataatagtgaggtacttcaatactccactgagagcactagacaggtcatcaagacagaaagtcaacaaagaaacaatggatttaaagtacaccctggagggggtggagccaagatggctgaataggaacagctccagtctacagctcccagcgtgagtgacgcagaagatgggtgatgtctgcatttccaactgaggtaccgggatcatctcaatggggagtgttggacagtgggtgcagaagagtgggtgcagcacaccgagcatgagtcgaagcagggcgagacatcacctcacccaggaagcgcaagggataagggaattccctttcctagtgaaagaaaggggtgacagacggcacctggaaaatcgggtcactcccaccctaatactgcgcttttccaatggtcttagcaaatggcacaccaggaaattatatcccacgcctggctcagagggccctacacccacggagcctcgctcattgctagcacagcagtctgagatcaaactgcaaggtggcagtgaggctgggggaggggcttccaccattgctgaggcttgaggaggtaaacaaagcagccaggaagctcaatctgggtggaacccagatcaaggaggcctgcctgcctctgtagactccacctctgggggcagggcgtagccaaacaaaagtcagcagaaacctctgaagacttaaatgtccctgtctgacagctttgaagagagtagtggttctcccagcatgcagcttgagatctgagaatggacagactgcctcctcaagtgggtcactgacccccgagtagcctaactgggaggcaccccccagtaggggcagactgacacctcacacgaccgggtactcctctgagacaaaacttccagaggaatgatcaggcagcaacatttgctgttcacaaatatccgctgttctgcagcctctgctgctgacacccaggcaaacagagtctggagtggacctccagcaaactccaacaaacctgcagctgagtgtcctgactgttagaaggaaaactaacaaacagaaaggacatccacaccaaaaccccatctgtacgtcaccatcatcaaagaccaaaggtagataaaaccacaaagatggggaaaaaacagagcagaaaaactggaaactctaaaaatcagagcacctctcctcctccaaaggaatgcagctcctcaccagcaatgaaacaaagctggacggagaatgactttgacgagttgagagaacaaggcttcagatgatcaaactactccgagctaaaggaggaagttcgaacccatggcaaagaagttaaaaacattgaaaaaaaattagatgaatggctacctagaataaccaatgcagagaagtccttaaaagacctgatggagctgaaaaccatggcacgagaactatgtgatgaatgcataagcctcaataaccgattcgatcaactggaagaaagggtatcagtgatggaagatcaaatgaatgaaatgaagtgagaagagaagtttagagaaaaaagaataaaaagaaaggaacaaagcctccaagaaatatgggactacgtgaaaagaccaaatctacgtctgattggtgtacctgaaagtgacggggagaatggaaccaagatagaaaacactctgcaggatattatccaggagaacttccccaatctagcaaggcaggccaacattcaaattcaggaaatacagagaacaccacaaagatactcctcgaaaagagcaactccaagacacataattgtcagattcaccaaagttgaaatgaagggaaaaaatgttaagggcagacagagagaaaggttgggttacccacaaagggaagcacatcagaataacagctgatctctcggcagaaactctacaagccagaagagagtggaggccaatattcaacattcttaaagaaaagaattttcaacccagaatttcatatccagccaaactaagcttcataagtgaaggagaaataaaatactttatagacaagcaaatgctgagagattttgtcaaaaccaggcctgtcctaaaagagctcctgaaggaagcactaaacatggaaaggaacaactggtaccagccactgcaaaaacatgccaaattgtaaagaccatcgaggctgggaagaaactgcatcaactaatgagcaaaataaccagctaacatcataatgacaggatcaaattcacacataacaatattaaccttaaatgtaaatgggctaaatgctccaattaaaagacacagactggcaaattggataaagagtcaagacccatcagtgtgctgtattcaggaaactcatctcacatgcagagacacacataggctcaaaataaagggatggaggaagatctaccaagcaaatggaaaacaaaaaggcagggtttgcaatcctagtctctgataaaacagactttaaaccaacaaagatcaaaagagacaaagaaggccattacataatggtaaagggatcaattcaacaagaagagctaactatcctaaatatatatgcacccaatacaggagcacccagattcataaagcaagtccttagagacctacaaagagacttagactcccacacaataataatgggagactttaacaccatactgtcaacattagacagatcaacgagacagaaagttaacaaggatatccaggaattgaactcagttctgcaccaagcggacctaatagacatctacagaactctccaccccaaatcaacagaatatacattcttctcagcactacaccacacctattccaaaattgatcacatagttgaaagtaaagcactcctcagcaaatgtaaaagaacagaaattataacaaactatctctcagaccacagtgcaatcaaactagaactcaggattaagaaactcactcaaaaccactcgactacatggaaactgaacaacctgctcctgaatgactactgggtacataacgaaatgaaggcagaaataaagatgttctttgaaaccaacaagaacaaagacgcaacataccagaatctctgggacacattcaaagcagtgtgtagagggaaatttatagcactaaatgcccacaagagaaagcaggacggatctaaaatggataccctaacatcacaattaaaagaactagagaagcaagagcaaacacattcaaaagctagcagaaggcaagaaataactaagatcagagcagaactgaaggaaatagagacacaaaaaacctttcaaaaaatcaatgaacccaggagctggttttttgaaaagatcaacaaaaccgatagaccactagcaagactaataaagaagaaaagagagaagaatcaaatagatgcaataaaaaatgataaaggggatatcaccaccgatcccgcagaaatacaaactaccatcagagaatactataaacacctctatacaaataaactagaaaacctagaagaaatggataaattcctcgacacatacaccctcccaagactaaaccaggaagaagttgaatctctgaatagaccaataacaggagctgaaattgaggcaataattaatagcttactgaccaaaaaaagtccaggaccagatggattcacagccaaattctaccagaggtacaaggaggagctggtaccattccttctgaaactattccaatcaatagaaaaagagggaatcctccctaactcattttatgaggccagcatcatcctgataccaaagcctggcagagacacaacaaaaaaagagaattttagaccaatatccctgatgaacatcaatgcaaaaatcctcaataaaatactggcaaaccaaatccagcagcacatcaaaaagcttgtccaccataatcaagtgggcttcatccctgggatgcaaggctggttcaacatatgcaaatcaataaatgtaatccagcatatatacagaaccaaagacaaaaaccacatgattacctcaatagatgcagaaaaggcctttgacaaaattcaacaaccttcatgctaaaaactctcaataaattaggtattgatgggatgtatctcaaaatcataagagctatctatgacaaacccacagccaatatcatactgaatgggcaagaactggaagcattccctttgaaaactggcacaagacagggatgccctctctcaccactcctattcaacatagtgttggaagttctggtcagggcaatcgggaaggaaaaggaaataaagggtattcaattaggaaaagaggaagtcaaattgtccctgtttgcagatgacatgattgtatatctagaaaaccccattgtctcattccaaaatctccttaagctgataggcaacttcagcaaagtctcaggatacaaaatcaatgtgcaaaaatcacaggcattcttatacaccaatagcagacaaacagacagccaaatcatgagtgaactcccattcacaattgcttcaaagagaataaaatacctaggaatcctacttacaagggatgtgaaggacctcttcaaggagaactacaaaccactgctcaatgaaataaaagaggatacaaacaaatggaagaacattacatgctcatgggtaggaagaatcaatatcatgaaaatggccatactgcccaaggtaatttatagattcaatgccatccccatcaagctaccaatgactttcttcacagaattggaaaaaactactttaaagttcatatggaaccaaaaaagagcccgcatcgccaagtcaatcctaagccaaaagaacaaagctggaggcatcatgctacctgacttcaaactatactacaaggctacagtaaccaaaacagcatggtactggtaccaaaacagagatacagaccaatggaacagaacagagccctcagaaataatgccacatatctacaactatctgatctttgaaaaacctgacaaaaacaagaaatggggaaaggattccctatttaataaatggtgctgggaaaactggctagccatatgtagaaagctgaaactggatcccttccttataccttatacaaaaattaattcaagatggattaaagacttcaatgttagacctaaaaccataaaaaccctagaagaaaacctaggcaataccattcaggacataggcatgggcaaggacttcatgtctaaaacaccaaaagcaatggcaacaaaagccaaaattgacaaatgggatcaaatgaaactaaagagcttctgcacagcaaaagaaactaccatcagagtgaacaggcaacctaaagaatgggagaaaaattttgcaatctactcatctgtccaagggctaatacctagaatctaaaatgaactcaaacaaatttacagaaaaaaacaaacaaccccatcaacaagtgggtgaaggatatgaacagacacttctcaaaagaagacatttatgcagccaacagacacatgaaaaaatgctcagcatcaccggccatcagagaaatgcaaatcaaaaccacaatgagataccatctcacacaagttagaatggcgatcatcaaaaactcaggaagcaacaggtgctggagaggatgtggagaaataggaacactttgacactgttggtgggactgtaaactagttcaaccattgtggaagtcagtgtggcgattcctcagggatctagacctagaaataccatctgacccagccatcccattattgggtatatacccaaagtattataaatcatgctgctataaagacacatgcacacgtatgtttattgcggcacttttcacaatagcaatgacttggaaccaacccaaatgtccaacaatgatagactggattaagaaaatgtggcacatatacaccatggaatactaggcagccataaaaagaaaatgagttcatgtcctttgtagggacatggatgaagctagaaaccatcattctcagcaaactatcgcaaggacaaaaaaccaaacaccgcatgttctcactcataggtgggaactgaacaatgagaacacttggacacaggaaggggaacatcacacaccggggcctgttgtggggtggggggtgaggggagggatagcattaggggatatacctaatgctaaatgacgagttaatgggtacagcacaccaacatggcacatgtatacatatgtaacaaacctgctcgttgtgcacatgtaccctaaaacttaaagtataataataaaaaaaagatcattctaaaatttatacaagcccttagaacagttaaaaatatcttaccaaaagaagaataaagttggaggaatcactctacctaatataaagtcttactacatagctacagtaattatgacagtgttatattggcagagggataaatacatcaatggcacaaagaatagatagagaaactggaagtagacccaaaacaatatggttaactgacttacgaaaaaatttcagaagccattcaatcgaggaaggatagggtggtattgttgttttttgttttaacaaattgtgctggataaattggacatacctatggaaaaaaaaatgaagtttgacttaaacatcatactttacacaaatattaactcaaaatggagcatgggcataaatctaaaacttcaaactgtaaaacatttagaaaaaaataggaaaaaaatcatcaggatctagtgttagtggaagagttctaaatgtgatccataaaacaaaaacaaataaactggactacatcaaaactaaaaaattctactctgtgaaagacctaattaagaggacaaaagacaagctacaggctggagacaatatatttaatccacgtatctatgaaaggactcatatctagaatatataaacaaccttaagaatctgacagtaaaaaaaaaaaatcagactaactggaccactcatacattgctgatggaaatgtaaagtggtacagccattttggtaaacatcattgctctctgacaaagatacggtgggtcccactgatgaactgtgctgccacagtaaatgtagccactatgcctatctccattctgaagatgtgtcacttcctgtttcagactcaaatcagccacagtggcagaagcccacgaaatcagaggtgaaatttaataatgaccactgcccattctcttcacttgtcccaagaggccattggaaatagtccaaagacccattgagggagatggacattatttcccagaagtaaatacagctcagcttgtactttggtacaactaatcgaccttaccactttcacaatctgctagcaaaggttatgcagcgcgtgaacatgatcatggcagaatcaccaggcctcatcaccatctgccttttaggatatctactcagtgctgaatgtacaggtttgtttccttttttaaaatacattgagtatgcttgccttttagatatagaaatatctgatgctgtcttcttcactaaattttgattacatgatttgacagcaatattgaagagtctaacagccagcacgcaggttggtaagtactggttctttgttagctaggttttcttcttcttcatttttaaaactaaatagatcgacaatgcttatgatgcatttatgtttaataaacactgttcagttcatgatttggtcatgtaattcctgttagaaaacattcatctccttggtttaaaaaaattaaaagtgggaaaacaaagaaatagcagaatatagtgaaaaaaaataaccacattatttttgtttggacttaccactttgaaatcaaaatgggaaacaaaagcacaaacaatggccttatttacacaaaaagtctgattttaagatatatgacatttcaaggtttcagaagtatgtaatgaggtgtgtctctaattttttaaattatatatcttcaatttaaagttttagttaaaacataaagattaacctttcattagcaagctgttagttatcaccaaagcttttcatggattaggaaaaaatcattttgtctctatgtcaaacatcttggagttgatatttggggaaacacaatactcagttgagttccctaggggagaaaagcaagcttaagaattgacataaagagtaggaagttagctaatgcaacatatatcactttgttttttcacaactacagtgactttatgtatttcccagaggaaggcatacagggaagaaattatcccatttggacaaacagcatgttctcacaggaagcatttatcacacttacttgtcaactttctagaatcaaatctagtagctgacagtaccaggatcaggggtgccaaccctaagcacccccagaaagctgactggccctgtggttcccactccagacatgatgtcagctgtgaaatcagactgaaatgctgaaataacgataaaaaaaaatacagaggttaaactagcaaagtgagtaaagtcaagggataaagaaaatttgttggaaaactcacaaagcaggacataaagcaaggccattagatatatctcattagtgtgacatctgggaggacaaagcatccaaaccctttcttctatataagtggtgagatgatgaaggttgtaagagggcttctgcccccttgaagacttcagatgctggggaaaggatagataagaataaggatgaaccaggcttttggagcctgggaaataatgactagcgataaacctgaagggaagttaagtatacgatccccagataatactaaggagaaaggcaatgtgattctgcagccattgtagccagagataataagcccttgaggaaggggccaggggaatttttctaaggatagacagtattaatgcagcactctcttctgctattaaactctcattggcttctaaaaggagtttcggtgagtgatttgctgagatgttgcattttcatggctgctgcctttaggtattattgcaacagtttggaattttgaaattaaaacagttctgtaaaaccagtttagttttgtaaagtgtatgcatcaaagatgtccttcattcagacattactgagttacaactatggtgccaggtactgtgtcagggtactaggggtatggggataaaccagactccctctttgatctaaagcagcatgaggccaggtgagaggtttcaatataatgtgataaaatgtgcactaggtactaagggatcatagagaaaggaacacattaaatggggaaacaattgatagagagagaatattttcatctgggtcttaaaagatgagtaggcgttctctctctttaaatgtctgatataagggcattttatgcaaagaggatcactcgtgcaaagactcagatttgcaagaacgtgaggtatttcaggagttttgtatggttccatatggactatgacaagtgagacaggtaaactaggcagagctggtcatcagataatgaagtcattaacctaaggagattggacaataaaatgcaatatggaggtatcgaagtataaacataaggagtaccactgatggctgatttaggatgcccagtctggcaacacgctaatgaaatgatagtgggggagggggccgtaccaagactaggagagagcagtcctgagactattgcaattatctgcgggagacataaaggctagaacctgaacagtagcagtacaaaaaaagaggggagttcaaatgatattaaggaagtagaagtggtatgacttaaccatctgggtatggaaggggaaatggctagagtcttggggactttgtgtttgatgtgattatggaccacagaataatgtctaagagaactggctctttagtctgactgccagagtctgaatcctgaatgttttagtatgttaccttgggcaaagcccttagcctctatgaatctatcttcctcattcataaaaataagatgacagtgcctatctcgtgggacttttgtgaggatgaagtgagataatggatgcaaagttactgagcacagtgtccaacacagcagaagcattacatatacattagctattactggctacattatgatatacagttagggagttggaaagataatctgaaattcaggagacgtatctgactataggtgagtatttggaactcattgttctgtaaacagtagttacagccacgtgtgtgggcatctggagagtgagcatggatattgtgatacctagtacagtgcctggcagtagtggttgtatgctcagtaaattttgttgacagggtcagggccggactagactgtggtaagcaaggcctgtagggcataaatatacttgtatgccccgagaagtgaggacctcttaaatattgtgccctacatgccttgtttggttcactcttgtcccagccctagcaagtatatataaggtgaaaaaggaaaaagctgaggctggagcctgggagaaccctggacatttaagggccatggagaggaacaggagttaatcaattcaagtgctggatggataacaggagttagagcaaagcggggaaccagaatagagtgattattataaaaagagtttcctaaaaagggagagatcaacaattagaaattatttagagcagccagtaaatacataaactcaaaattattctttaggtcattcctgattgtgacaatagtcatttcattatataaatgtgattaaggaaggaaaagagctacacagaagttattaaagagctaaagagaattgagaaatttaaaacagaagaaagtagggccaacatgaaaggagtagggagaaaaagagataaccagcatattgtctcactgatcctgccaacacctgtgagatagatattcttattatactactgttaaacctaatttacatttgacaaagttaaggttcagagcttgtgtgacttgtccaaggtcacaggtctagaggaggcagatacttgattcaaacctatttctgtctgatctgattctaaagtctgttttttcactcaaccacactgtacagtcagctctccttgtgagttccacagccacagattcaattaactgcagatcaaaaatattcaagaaaaaaatggatggttgcatctctactgaacatgtacagactcttttatctttcattattccctaaacaatacagcataacaactatttacatagcatttacattgtattagctattaagagaaacctagagatgatttaaagtacaaaggaggatgtgtttaggttatatgcaaatagtaagccatttttatatcggagacttgagcatccacagatcttgatatttgcagggggtcttgccaccaattttccatggatactgaggaacgactgtaaatggatgcaggcatggatgctatttaggagtgtccagggccaagtaaatgagttgctgagcagagaggtgggtggaggctgtgaggcatcaatatgtggtggcatccatctgcattttggtgatttttttccttcacagtcctcggctgtctgggaagagaaggatgaaggcagatggctgctccaatttaggggctaggattgcagggtgggcacagcattgcaaacgagtgaaggaaattgagaaatatggccaatgaagagttgaagagaggcctggcatggtggctcacacctataatcccagcactttcagaggcccaggcaggcagatcacttgaggtcaggagttcgacaccagcctggccaacaaggtgaaatggtgaaaccccggctttactaaaaatacaaaaattagctgggcatggtggcgggtgcctgtaatcccagctacttgggaggctgaggcaggagaatagcttgaacctgggagatggaggttgcagtgagctgagatcgcaccactgcactccagcctgggcgacagagcaagactctgtcaaaaaaaaaagagttgaagagaaaaagtctaggctaaattcaaagaaaaaaagtgagcccaaaaggaacttgcagagcaagggaaaagcagggatgtcaagggactagaacactccataaagtgaacagctgcaatgaaaataagggaagaaagtttagttcatctccgtttctttcctttcctttttactttcctttctcttcctttttggagttaatcaggaagtagtcccaaataccccagaaagttcatcttataagcccttggtcctcttgagatggtatcagatatattgctagacccttgaagaaaggaacaactccaggcaacttcttgagtccctgttattaattttatacatacacacacatatatgtatatacatgaaaacacacaaacacatgtgtgtgtatacagccatgcattccttaacaatggggatatattctgagaaatgtgtcattaagcaatttcatcattgtgcgaacataatagagtgtacttacctaaacctaaatggtatagcttactacatacctaggttgtattgatgtggcctattgctcctaggctcctgggctgcaaacctgtacagcatgtgactgtactgaacactgtaggcaatggtaacagtggtatttgtgtatctaaacatagaaaaggtacagtgaaaatacagtattataaccttatgggaccactgtcgtataatgtggtccatcattgaccaaaatgtcattgtgcagcaaatgattatctcatatatatatatatatgatatgatatatatgatatatatgtgtgtgtatatatgtatacatatatatgtgtacatatatgtatacatatatacacacacatatatatgtacacacatatatgtatatatatgtacacacatatatgtatatatatatgtacacacacacacatagagagagagagagaggagaggagaggaaggagggagggaaggagaaatatgattcagatagagacatctatcctccagagttcaggagtgtctcttcagactaggtagatgtagcttaaaaaaaacatatcctgaattctagagagatgcttaaatcactgcaattcctataacacttgccaaccaaaggtgctgttgatctgaaattgcttttttaaattaatgcagtgatttttctttaacatctagtgacagacactggggtcacatttgcagctggaccataattaggcttctgttcttcaggagacatttgttcaaagtcatttgggcaaccatattctgaaaacagcccagccagggtgatggatcactttgcaaagatcctcaatgagctattttcaagtgatgacaaagtgtgaagttaaccgctcatttgagaactttctttttcatccaaagtaaattcaaatatgattagaaatctgaccttttattactggaattctcttgactaaaagtaaaattgaattttaattcctaaatctccatgtgtatacagtactgtgggaacatcacagattttggctccatgccctaaagagaaattggctttcagattatttggattaaaaacaaagactttcttaagagatgtaaaattttcatgatgttttcttttttgctaaaactaaagaattattcttttacatttcagtttttcttgatcatgaaaacgccaacaaaattctgaatcggccaaagaggtataattcaggtaaattggaagagtttgttcaagggaaccttgagagagaatgtatggaagaaaagtgtagttttgaagaagcacgagaagtttttgaaaacactgaaagaacagtgagtatttccacataatacccttcagatgcagagcatagaatagaaaatctttaaaaagacacttctctttaaaattttaaagcatccatatatatttatgtatgttaaatgttataaaagataggaaatcaataccaaaacactttagatattaccgttaatttgtcttcttttattctttatagactgaattttggaagcagtatgttggtaagcaattcattttatcctctagctaatatatgaaacatatgagaattatgtgggttttttctctgcataaatagataatatattaaactttgtcaaaaggactcagaaagatcagtccaaccctctaacccatattgaatggtgatatactacagggttatgccagtgtgggaactatcgctggtaaataagtttaatcctccctagggcttcacaaagaacattgttccaccccaggagggtggaaggaagaaactgaaatgattgtgtcttagaacctaatgaaagtttgcattcctcagtaaaatcagagactgctgattgacttaaatgtttatagcttcaaagtcctcctcattatcatggcccacaagcccttccatgattgtccttccccaccctccccattacccttcttgcctcctctgctacttctctcctcgcacactgggctccagccaccctggccttcctgtcacttcttgcacactctaggaatgctcccactttggaggctttatctggctgtttctcttatttggctgttcccaacttcctgtgggctgactccctcacctccttcgggtctttgcccaaatgttaccatcttaatgaggcctaccttcaccatctattaatacttcaacctgccccagtagccttaccactctagacacctgtacagaactccactctactttttaacagagcttttcaccatctaatgtatcatataatttcttactcatactatttatcatttattttctcctactccactaaaatgcaagtttcatgttggcagggatattcaattgttttgtttattgatatattcctagcacctagaacagtatctggaaaagaggtactcagtaaatatttatcaaatgaattgaccaaaagaaggaaaactcaaaactttaatgacaactaactttaaagctacaataacttaaaattcagcagtaggattttgagggagggtaagtttcaaagattgacttacctaagactatctgcataaataaaaagaaattaatccagacaacaaattcaccaacttccatcaattggaaatccaattctattttctacagtttatgttctggagacactactggacactcttttactctcataactcataactcctccacttttgtttttaaatcatgagagaaaaagagttgactctgttatattgttttatctacctttccttgatcttagaaacgaatactaccataccagcttctactgaggtgccccctaaagttagtccaaataggtctttgcaatctccattcccgcagaatttagaactttgaatcacatgatttatttctaaaagtaaatccatgccgattttccccaccaaaaaattcctgactattaaactcctacaatcccttcattgctcactccccacccccaggatcatattttaaagttgggcccttgccttttgggtcacataggtacactgtttgctataccacaggtatagctatctggaaaacatggagggtattattctgttactactgcttcgtcaaccaaaaaataaaacaaaacaagaacaaaaaagaaacaaactccctgcctcttttcacttgcagtcaaggttcctaaccactacaaaattagcctatgtttcttcttgcacatagtagaaacccaagcttctcactgctgtgctattctgtaccatcaactcatcacataaagagcctggttgaagaatgattgtccaaccacattactagcatctgtcaagactttccagtttacaaaaggcctatcacatttaaccctcacaccatccttgtgaccaaagcattattaactccattttacaggagagtaaactgaagcttagggaagttaaaagaactgccaaaggtctcccagttggggagtcatgaagcccagaagagaagccaaattctctgctgctcaaccccttgctttcactattacacctcagggccttcaaatctaaatgcagttattcattaaacaggaacctggtagtcttaaacaggaatctctcacttggtaagatcttgtctcttgttgtatttgaccccaactgtctatggctttgcctgaacccaaagtacacacagcctagaaaccaaaggagaaccaaatgtgggataaaatgacactcattttaacgacatgtctcagcaaatgagttcctgtgtagctggctgaaagcccagaccctttcagtaaaacatcctgaataattcacatttgttggtctataatataaagggcaaatgtagctcatttttagaccagttctgaacatcaatagtaacaaaccagagataaccgattttgttttcatagaattggaacaaattagagtatctgtgcaaaagcatatcagatctaggagcagaggggacaaggtctaatttttaaataagcaaattttccagggagggactacttatgataaagggatattagtctcttagtcaacggaacctggatacacgcttctgacagagaagagggagaataggcaggaatctacacaccagatgtcaaggagatttgctttaaaatacgactgataattagaaatttctcagtttcccccttttccctcattctttgattcttattgttatctttatctcttactcctttgtttctcatatattgagtcttacagatcaagctcctatttttttcttcaggggtatttttctagttcaaagtgcctaccatctcccttctggttctattcatccttctctcccaaagctcctttagaagtgtggattaaggcagagcactaagaaaccagacttaaagattcccttctcattctgacttttctcctttcacctattccttcctcctgttttcttaccatcagtgtcttcaaaggctttcaagtacacggtaaatgcagaaacttcaagaaaggcagaatggaaacataaccaatgcatacataaataaagcacactgtagaatctttttaaattctgtatgatatatcgaatgctgtctctcacattacctagaccatttgaaaccgaatttgtaaaacatagactatctttaagtagtaacagatgcttctgacatgttttctattgtcttgaaccattactgcatatgatacatcaaagttaagtgacaatacaagaaagcagattcatttgctccctgcctaggccgtcagttcctaaagtggaaacgccatatattatctagctcagtttgctctacaagacctgcaatagagccttgtgtgacatagagataatatttgttgaagcaattaaatttgacttggaattaactctgccatcattctataaggaaggattgaaaatccttctcaccctgtgctgatatagtacctttctatacaaaaacgtccttctccctcttcccttggattgcataaactatgtacatgccttcctcagggcacttttctaggacagtgtcagcctaaggatctttgtttgggtggcttttagaaactcaggaagacaggagcatcatatgcctataggcagctggcttccaggtcagtagttttgctctgaccctaaaatcagactcccatcccaatgagtatctacaggggaggaccgggcattctaagcagtttacgtgccaattcaatttcttaacctatctcaaagatggagatcagtgtgagtccaatccatgtttaaatggcggcagttgcaaggatgacattaattcctatgaatgttggtgtccctttggatttgaaggaaagaactgtgaattaggtaagtaactattttttgaatactcatggttcaaagtttccctctgaaacaagttgaaactggaaaatgcaatattggtgtatcataatttttcttaaaaacatacctttgatgcttataaacatttcatttgtagtgatagttttcaggatatgagttcaagaagctacattaaaatcaataacaatatttggtaactaatattaagtaataatgatgttccactcacttattaatctttaatacaaccgtatgtggttagtactatcattatgcgcattctatgcagatgagaaaaccgcaactccaacggccaaaaattacagaggcataaatggtttagacaggacttaaacttcagtgtgaccaaaacccatgcttctaactactatattcaaaactcagagaaaactgaacccagaaaattgaaatcatgactaaattgctatcaacataggtagtgaaagtcaattaagtacagaactggagtatgactggccaattatcccatataatgggaattctccacatgtacaaaccacttcatatgctaaacttgttgacaacattcaaagctcatccctgaatttgactatattgattacatcaaaaatgttacatagcaaccttagaatccttgtgtaccttttcttctcaaagcctagattatttctttttccgacgtttcagtaattggagcagtaaaccccagtgtcccttacctacttgtttattacctccagatgcaatattactggtactgtgattgagaaacgcacacagtgctaatgaggaattcactttctactctgacactctggaagaatagagatgcaatcctaaggaagaatttaacaccacaggctacatgactaaggataaagagtagaaaattagcaggactctattaaggcattacagcaatccacctgacagatgaaaaaggcatgaaatgaaatgaaatgtagcagctacactcgtcctattgagaaaggaaaaaagtcacctgtaatgttgttcagaaatcctttcagtactaaaaaattcattgaccatcttcctttagtctcgaaaatttcttagaaggtaaaaaaaggaaaaggtgacagggcaaagacatttgaaaagaaagaaaagagtgaatgaacttgcacacctggcttggactcccattcccttaggtttccattgtgggggacaaactaatgcctgggttacctttcttgagagtgtgttaattgattcaatatctctgaagtgctactttcatctgaaaggttataatttgaaattcagatttacctggataaatttgatcttgctattatggaaacctctagaaatccttggagtagttactcattatcagcttaaataatatagccggtggagctgagggaatgagtaactcaattagtctcagttacaactgaagggcacattgttgtaaactataattgaaaacataaatatctttacctagtttaaaaataaagatgctttaaaaggaggaagggaatagccctgaggaatgtaaatataagcacaaaacttctacaacagagtttgctacgtgtgtggctgtgttccacccagcaaaaatgctaagtctacaactgacacaacttggatactctcatgttcccacattttggtttggtcaaggctgtgcagttgtactgcagccaccaccactcctggcctctacagtatattgatctgacccaccaatctgatcaaggtttagaaaaatattttcagcccagttagctcacaaacaaaatgagaattcccacaaattgctctttatctcagacaacagaggaaagctacagcaaaagcataaacaaattaccatttaagtttgttgcttcaaattaaagactaattgcaacagctactagatagcacagtttatggggcatctcggccccaagtcttttgtcttataaggtcttgaaaaaaagaaaggagattttcatcaataagagttttttgttatctttttcccttgttcatcaggcccttcactgcgagagagaggtgtaaacgttcagggcatgcattctagttaaagaatattaattggctattgggtccctttggttagaataaagacctctgtatgatgtccctagctgtacatcaaacccaaatatctctcagataaatgaaggtctgtaagaatttggtcattcctgtctcttctaaagagtaacagaggcattttcccgcagtaaagtagaatggaaagaaaacaaaaatcacaagcctataaacaccttcttcaattttcccagcatgtcacagacactactgtcttatttactacgtatttctgaggagtaaaaaaaggaaatatgttgagtttagctgaagcacagcatattttgtggtaaacttgttaaataaaacatcttttgtccaagctttggttgtcacacaagtggatatatcaggaaatataaaggcagaataaactaaagcagaacatactaacatttgtagtaggcatgaagggaattagaaagtgtttgtgttaacatggagggagggagaacagatgctttgagatgttcttcaacagatattctaggcactgagacccccttcgggaccagagagagcccatatccaccacagtacctgacacataaatgctcagtaattgataaatgagtcccattctaactgttccttagccctgctctatggaactctcccctggaattccttgtgccattattttatttctggaatcttcagccttttagctgagggcaaaagattgctgattaggaagcaatatttcccacctcctgcgcaaaacaagccaaagatcaacagcagcagcaacatactgagccctaaagggcaatgacaaatgtggagaatgatacagaggtctggttacttcttagccaatgacacagaatcacaattgagaaaacacagagtttattcattcccattgtgcatgccctggacaaaccaagctgcacctttcgtaacttatcacaatctcatattgacggaacactttctacaggtaatgtttgatttggctgaacactttagcattgcttcgtagcaacaaaatgatagctagtaacagaaaaagatccagggatattaccactgttagtgaggagaaaggccttttaattaattaattaattaattaataggaccaagtgccatctttttggatcatgcccttagtggattattggtagcaaaggttaaagctcaagctggttcctttgtccccctggcaacagttgatttgcctccctttatctcctgaagtatccgtaaggactaagagccaattattacatttggctatgctagcatatgtaaaatagagtttaaaagtttagattcatcactcaaaaattcatattctccaaaaccatacagtcactctgttagcctgtgttcccccagaaaaaaagtcacaagcttatttattaacatgtgcaatcccagggggcaagagaaaggaactgaagagtgaggcagaaaggaaaagaaagccaataagaggatgagttatcaaactactcgtttctaacagcaactgattgcttaacttcctgggactgtctccaataagtcaaattggcctcaggttagtccacctgagtgggaagaagcggtgaaagaatttgtctgtcagtatctgtctctcattggttagaagttcgacttatggggaattaactccctcacatttcctagttggatatgcttgggtacccagagggtcatatggcatccatgcctcagcatgaacagggaagcttcaaggcaaaagacacatagtgcagctatgagccaaggcaattcaaggatacacccataggaggctggttgacatccacccagagctaatcaccaccatgctggaaaaagacacaggtgaagctgagaagaatgaaggtggtgcataggaggtatctaatacagtcactcattttcaaactttccatgttatgattgcactgaccactgaggatttctattgaaagttttactgttgtcaaacacgtacacaaggggaaaggtgtcttacattgtttatgttcctgtgctgctctagaaacagaaataggctcaagagcagagcctgtttttcttaattcagcaggtctaagctaacaagtcctgaaacatggtacttcctgttattggtattgcataggagaaacaaagggaaagcacagtaattagaaaatacaaaacaagatggcaggaataagccaaaaatatcaggaaacacaattattgtgaattgggattaaactaatctattaataatgacaactttcagcttggagttaaaaatttaattgtatactgttaacgaaagtgatacctaaaataaaattacactgggaggccaaaatgaagggatgtgaaaagaactatcaggtaaaaactaacaaaaagaaactagcaaagcaatcttaatatcagacaaaatagaatccaagaggaaaatcatttcaaaagacaagagattttttttattaataaggggaattgcataggagagtaaagaaaatgtgggccactggaatgcttagcactaatgacatattggtctttggtcttcagttaccttacaggaccctatttcattctcttatgtttgatatgtaaccacctcagccagcttcaagttgctttttggccctaatggacttcctagcactataatttcttttttttaaatgttttattttaggtttaggggtacatgtgaaggtttgttacatagataaacatgtgtcacaggggtttgttgtacatattattacatgacgcagatattcagctcagtaccaaatagtgatcttttctgctcctctgcctcatcccaccctcctccctcaagtagactccagtatctgttgtttccttctttgtgtttataagttcttaacacttagctcccgcttacaagtgagaacctgcagtatttgatttttgttcctacgctagtttcctaaggatgatagcctccagctccattcatattcccacaaaagacataatctccttcttttctatggctgcataatattccatggtatatatgaaccacattttctttatccggtctgtcattgatgggcatttaggttgattccatgtctgctattctaacactgtaatttctaaagacttccagattctacttttataggtaacctgttaaacagtctagctctggaagccaagcaatttctagaataactaagcaatagaaattacacttcaatgcagaaaggcagtatctacatgagattatgaaattgcggttgctttttgtgttcactgaaaaaaataagtaaaactgtaactttcagaaaaaatgattgtacatatagaaaacccaaagcatctaaacaattaaaataaataagtatagaaagattactggatacagagtcaacatacaaatatcaattgtatgtctatataccagcaacgattcaaaaatgatttttataatagcattaaaaattagacgcttagtaataaatgtgagaaagatgtgcaagaactctacataaaaaattatgagacgttattgagaaaaattaaggaaaacctaaataaatgaatgaataggcaatgtttatcaattaaaggatacaatatagtaaatatatcaaatgtttactaatggattcaatgcaataccaaagtgcccagcaggctttttttggtggtgggaggtcgggcaggattcataagctaattataaaatgcatatggaaatgcaaagagccaaggatagccaagacagttttgaggaagaataaacttgtactacttacactaccagatgtcaagacttattatcgagttacatttattaagacagtgtggtactgacacaaggatagacaaatagatcagtgaaacacactagagtgctcagaagcacacctgtacatatataaaggcttgatttatgatagaggtgccagtgcagtagagaaggaaattattggtgttttcaataaaaagtgataggtcaattagatattcatatggcatgaagtatgaaacaataacaatttatattcataacttgcagaaagcaaaaatttcttaaaatacaaaaagtgatcaccataaaggaaaagattgataaactggactatattaaaactaaggactcctgttcagcaaaagacactacttcgactgaaaagacaagtcacagagtgagacaagatatctgcaatacagatacctaataactgaaccccatacagtgatggtgggaatttaagttcgtacaatcattttagaaaattgcttggcagtatctactagatctgaacatgtgatccagtaattacactcataattataagccagtaaaaaggcatgtttatgtcaccaaaagatatatacaagaatgttcattacactattatacataagagccaaaaactggaaacaaaccaaatatccattaacagtagaatgaataaataaaagctgtaatagtaatacagtggaatactacacagcaatgtaaatgaactactgctgtacaaaacaacatggtttaatctcacagacaaaatgttaaatgaaagacacagacgagtacatattgcgaacttctgtttataattcaagaactggcaagaactgtttactgtgttagaagtccaggtaatggtaacctataaaaaggaaaaagggtggaatgattgggagggggcatcttctggggtattgataatgtgctatgtattggtcagtttagtgtttaaacaggctcatttactttgtgaaaacttacactaaaattgtgtgtattttttgaatatatgttatacattaataaatagggtttttaaacctgtagttcataatttagtgaaagtagaatatccaaacatttagttttaaaccaatcaattatagtgctaccatcatttttatgcattattgagaagtttattttacctttctttccactcttatttcaaggctccaaaatttctctccccaacgtatattgggggcaacatgaatgcccccaatgtatatttgacccatacatgagtcagtagttccatgtactttttagaaatgcatgttaaatgatgctgttactgtctattttgcttcttttagatgtaacatgtaacattaagaatggcagatgcgagcagttttgtaaaaatagtgctgataacaaggtggtttgctcctgtactgagggatatcgacttgcagaaaaccagaagtcctgtgaaccagcaggtcataatctgaataagattttttaaagaaaatctgtatctgaaacttcagcattttaacaaacctacataattttaattcctacttgaatctgcttccttttgaaatcatagaaaatatcagtagcttgaattagaccaattaattttctagattgcatcatattttaaatataaactatgtaatcatctacaacctgaattctttctgtgtccaatttgtccaatttttttctctaacatttatatcacaaagcaattaatttgtgtgatttctgcatatgtatttgtaattcatcaagtcaaatcaatgtagtaatactatatcataaaatatacacaaataattgagtgataggcttctagtataaggacggtaagtttgaagcatgattctatctgggctggctagtttactctgagaaagttattttttattgttgggtcttaagctgagtttacacacttggtgtcagaatgattccggcaatgaactgttttatgttctgctaggctgatcagcacaatctatatggctgtgaacaaaacaatgtttcccagtcatgccaaccatgccaccattttaacagctgattagtgtattcagaacatctccactccatgttcgtatggctgttatctaaagatgaaagcagtagacacttttattttttgaaaaatttaggctctgcagggtcaattatatttgataaatgaggggcttttttgaagcaaactagatataatttcttttgcatttctaaagcctgatatcttattaattggtacattaaattgtgcaccatttctctgtaactgtttcagtacctgtctcagcactataccaggcagaagaaattaaagaaagaaccagtgccgagatcagcttggtcagggagaccctaatcctgcggcactagaggaattaaagacacacacacagaaatatagagtatggagtgggaaatcaggggtctcacagccttcagagctgagagccccgaacagagatttacccacatatttattgacagcaagccagtcataagatttactgaaagtattccttatgggaaataaagggatgagtctggctagttatctgcagcaggaacatgtccttaaggcacaaatcacttatgcaattgtctgtggtttaagaacacctttaagcagttttccgccctgggtgggccaggtgttccttgccctcattctggtaaacccacaaccttccagtgtggatatcaaggccatcacgagcatatcacagtgctgcagagattttgtttatggccagttttggggccagtttatggccagatttggaggcctgttcccaacaaaccagaagctaggaatatatatcctgcaaataaaatgaagaatctctaaggcttcagggcctgcccacttgttcttctgcctggttcttcacatacactgtctcaaagctagtctaccttgagaggagcatgaatatgtgtgtgggtgtgtgtctgtgtattttaaccttaaaaacctaacttccagtatagacagatggcatactagctaaacccttacaagttcttctatgctataaaagagaaacagaattgagaaccacctccaactattaagtgttatatttgaatatagccttagctttagcagaataagtaggccaaacttaaaataagcttttctgccttttcaatgataaaggtcccttttctgtagccattgttgattgtgtacacttatacataagtattttgaactaatttcctgttttctcaaccacttgctgtcttcatgatactttgtcgcagctggttgctatagaaatgtctgttacaaggaatgtggcttgaaggaaagtgataaatgaaaatgaaatgtgaagtgactttgtttgactacaaattcccattctggtagtccccagtgtatcaatacattatttttctttagaaaataaaccaacccaaggaaaaatggtgggcaggtcctggtgaatatggctgtgataattatattagcaatctctttggctaatatttgaagcccaaataattgaatcacaatgatctctccccagaaaatatataaaatgcaccttggaatctagaaggccttttagtctgcaaaagaaaccttcttaatcataagcagcagaagtcccatttaccaaattggaaagttaaagttacaaagcatcaatcataagacttccattcagggatggcaattgggagtaagactttttagtaaagaaactaaacacaaagtcattagactctgtaaaagtcttaccaaatttgattctggaacacctattctatttccgtaaagatgatgaattccggagccaaatgttcttttcatgaaggatttgaaaactgtccatgaaaataacgcaatcaaccttttagcttgagactctattcactgattagatttttttaaatactgatgggcctgcttctcagaagtgacaaggatgggcctcaatctcaatttttgtaatacatgttccatttgccaatgagaaatatcaggttactaatttttcttctatttttctagtgccatttccatgtggaagagtttctgtttcacaaacttctaagctcacccgtgctgagactgtttttcctgatgtggactatgtaaattctactgaagctgaaaccattttggataacatcactcaaagcacccaatcatttaatgacttcactcgggttgttggtggagaagatgccaaaccaggtcaattcccttggcaggtactttatactgatggtgtgtcaaaactggagctcagctggcaagacacaggccaggtgggagactgaggctattttactagacagacctattgggatgtgagaagtatttaggcaagtttcagcactaaccaatgtgagaaggcctccagagatgagcagttggtgaaagagaggctcaaaaccagctaccatacaggtcaagaagaatttggcattaaggaaacagcatagcaggattccagacaggcaactggtcaacaacatgaaggtctggaagaaaggtcgcaggtactcaggttcagggcactacttcagcttcagcccttgcaaaaactggtgagagttggaaagtctttaggctaagaaaaattggattatttaaaagggggtaaagaaagggactcaaggaggaaggattaaggcaagaactaggttccaagaaacagggcatgagagagagtcttgatctaccactatagttctcgtggtagcatcagaatcacctgggaacgtagaaatgcaaattctcctgctctacactagacctaccaaatcagaatatctagggggtggggcccagcagtctgtgcgcaaacaagcactgcaggtgattttgatgcacattatagtttgaaaactaggccaggtgcagtggctcatgccaataatcccagcactttgggagactgagacgggaggattgcttaaacccaggagtttgagaccagcctgggcaacacggcgaaaccccacctctaattaaaaaaaatacaaaaattagctaggtgtgatggctcccacctgtgctcccagctattcaggaggctgaggtgggagaatcacctgagcctggaaagtcgaggctgcagtgaattgtgatcacaccactgcacttcagcctgagtgacagagtaagaccctatctcaaaaaacagaaaaagaaaaacactggcccaaaggaaatgaacttgttacagaagccggggttcaaaacaccaaataatgcacttgtacctagtccttcccgggtgctctgcagacatttctccaagcgtagtctgcaaacaacctacatatgtagaattacctatgcacatttttcatttaacaaccaagagctacatttgtagcaaaatctgggttgtaacttagcctacagctgaagcctaagagattccgtctgtgagaagaaataacccacctctttggcccccctccccaggcaggaagccaggatggtccttatataaagttgtgctgtccaataggtaaccactagccacatatggctatttaaatttaaattaactacaattaagagaaattaaaaattcaattcctcaattgcacctgccaaattttaagcacataacaaccacatgtggctagtaactactgtattggagagtgcaagcggagatagaacactctattactgcagaaatttctattggatagcacttataatagtttagtgtaacttaaaactccctagttgccacagtcatgatttagtagtaatttcatggatttctctactgaggttagaatctctgccattagagactgataaatttaaagtttgcaattatcaaactggtgacaatttaagccagaatcaggtaaatgtcctcagttttaacagcattggaattttctgggactagctgtgtatctatccaggattcttgagaatgcctgccatttttcaacataatggatgtaaggtattacacatatacctggggatggggtggtaggtataattgcacaagcattgtggagaatggtatcaaagagtggcagaacatcacaatcaaggttttccctttcttttacctttgctttttaaaaagacaatatttgctggacctgatcttataactcataaatgggacactgtatgttcctttttacctcctctgtttctacttaattgcaccctatgaggactgcttcccttacctaccataaccccttccttcactcatccatatctttactcttcttcacaactctgtaatattgaccttctttatgaacctttcctggaacaatccctcttaagtgcaagcactgttattatgccttcaatgtatttaatatccatgtatctattctctctaattttgtcattttgtgttctcatgtattttcattcattatgtgtccaacttccatggataacatggttacaacaaaagatcctactttatgacaattatcttccttgggtttgtgggacatagaacagtgctcagagtaggggatccaagaacccaggagaatatattagctaagaagataacttccgtttttaaaagtccaagattcaggagatcaaaaccatcctggctaacatagtgaaaccccgtctcttccaaaaatacaaaaaattagcccggcgtggtggcaggcgcctatagtcccagctacacgggaggctgaggcaggagaatggcgtgaaccggggaggcggagctggcagtgagccgagatcccgccactgcactccagcctgggcgacagagcgagactccgtctcaaaaaaaaaaaaaaaaaaaaagtccaagattaaaaaaaaaaaaaaaaaaggatgtctgctttgtgagtttagcattgtctccttgtcattccagaaatgaaatggcaaatacatttaaatcagaactaaaaaggggaacagggtataaaggctcaatttagtcacatcatttccgtttctcacccaccccctttaaaccagatgtttgccaatgcattaacaatgcagatgtttcctgaaagaaagtttagtaactcaagcagacaccttattttcttttcaagcagaaaagactatgagatggtggttgtggttgttccgggagggagaagatataaatgatacacattatttcaaatcatttcatgacctcactgcacacttatagttattgtacctgttgtctttttgctgtcaagcctagctaagatcatttggaatgttcaagatcactcatacatgcatgtgcacacatacacatgcacatatgttcactccctatttcatccacatgaactaagattactgatgtgtacagattcaaagcacttttattcttttccaaaggcaagaagctgagctactttccagaatagttgtgaaagaccctgtcatacttctgcattgtttcctccacaccacctccatccagttccttatgaatggttactggttttcaaaaatatgagataaattgagtgtataaaagtcatttttagacaaaatgaaacaggaaatgaaagaaaccagaatctctcctcatttgtggatgggccagctccaccatgtcatggttaatctgcagggaggaaatactagatttgattgcagatcagactgcagcaaacctgctgtgactaaggcatcaagagaaagcaagcaacagctggggcttcagtggtgaaaacattatatatctagctttgaaatatgaaatactgtttagcagtgtcacctagaaaagagtgtttcaaaatgctgatgcttcataagaacctttctcttcagagttgtttcttttatctttcaaattagccagggtgggaaataaagtgatcacttggtgaagaaatctcacaaagaagaacatagagagttcactttcatctggagtaatgaacagattgaacaaactagaaatggttagtctgttaaagaaaaggtgtaggtgagctgtttgcaagagccacaagggaaaggggaagacaacttctttgtggacttaagggtgaaagttgcaagcaggcaagacgattctgacctccattaagaaagccctttccaaccaacaaccactgggttggttacgcaggttgggcagcattgggagcaaatgttgattgaacaaatgtttgtcggaattgttgacttaaagagctgttctgtcactggggacagcagcggctagatagccccattcagggagagggcatttgttcacctggccagagatcagagcaggctaagggactgctgggatcctgtccagctttgagaccctacagagccatgttcacctagcacgtatcccgtctgcggtcacgctcatttcttaccttattccagggctttcacctcagcttgccaggctggagccaagggccaacgcagccgcgccttgttcgcgatggtagcttcccaggagccccctatggttccggaacggcgctgccggccccatcctgtttgctacctcctaaagccaaaggcactggcgggccgggccagcttctaaagtcgcgcaaggttagaaggttccggacaggaacggcgtgaggccaatggaaggaggtacttcagtttccctccagatgcccagcgatgggctcagagctccttgagaactcgggaaaggaagcagggtctctgaagaaatacttcaggagtagaaagaggaagctagagggttaaatgcactacacaggaacagaaatgagtttttcttagagttagtatatgtctagaggtgtagtaaactaaaacaagtcttgaattgcataccgccacgtagggaagaaatgaaaacctttgaatattagtgaaaaaagggaaactgcaacgcctgtattactagatagctttcatcaacagctcaaaaccgacagatttaaagaagcaacaccgcattttggctttctaaagctttaatttggtttggatcccatgcccatgaccctgccagctgacaattctaagcatgcgcaaactggccccaaaaattcctcccacatttccgaagaactatttggccctttatgtgaagtacctggtttttccattttctgttttaccataggcctcagttcggtgtgtggcgtatttattctacatttaacaatttgaagatcattctattagattaaaaaaaaagaatacaatggaagccaagtgattaagctttccttatgcttatattaagttgtagcatatgcatttaccgatagttaaccgtattaacctacagaaaatgtccagggaaatggtctatttcttattctatttttgacctaaagaaaatctttaaaatgtcttagcattttccccagtctccatccactttcctcagctttggcctgaagctatctttaaaggtaccctgtacagctcttgccctgtacagctagctacagagattcaatcctttctgttcgattaggacacatctcagtggcagataacatgcaaagttattatatgtatgaaccagaacttgtttttccttaggggccaggatgttacactaaggtcttaagactatagtaatatcttcacttgaaaaagccctctattattcctatctcagatgataaaaattcaattaagagaaataagaacgtgacatgtgtaatcgcacctggctctacaaagctagtctggacagacatttaaacaattatcctctaagattatttgatgaaatgcatttcaatgactagttaaccattaaaaaccaaagtgagcatcccatctgttcccagtcaaatgacctagagcaaaggactaggcaaaccacatctgtgggcatagcaagctgtacatcacaaacaaatgaatttgctttgtatatgagtgagagcaaacactctttattgtacaacttgggtgggtaagtagggagaataatggttttactgaaatcgcaggtaacggttacgttggagttaaaggttaggaagaaaaccaaagggtaagagctgttgttctgggctggcattgtcaatgaagagcataaattcagatgtgaatgtatattttgtagaagcatgtgtgttgttggtttttgtgtatgtgtgagtctgaaagagggaaaacaggctcccattagactatgactaacaaaaatgtttgacagattataactcagatgtcttactcagagcatatgccttcccattttccccattattccccaacatgatgtctttaagaacttgtccttgaccgagcagacatctcataccccaaatagctaatattttgatagctatgatcctgaacggccaaacattccaaaaccaagtagtttgtaatatctttaaatgcaaatatattttaggccttttccttggcaaggatgtttggtcaggggttggcaaaaataatgctcttcagacttaaaagaacacaaccatatttcttagccatccaccagaaagtagtagaagctccaggaagcaagtctttgtcaggagtcagactagctacatcataatctctctgcccaggggctgtggatgtcatccatcctggcctaactagcctactgagctgagagatgtccaatttccccccaatacactaaccagaggagaaggaccgtgatatcattgcatgtgaattcttaattccaattgcttaaacaaatatgttcagttgtaactatcaataccagtatataacagtgttggccaagttttattgatgctgacaatcaattggagttacagccagacacatggtcttatgaccggcgtacttacgcagggctttgcactgagacaggtcgtgcatctgaggtttactgctttgcatttttgttttgtaactgaagtctgatgagacagccagagcatgtgctacctagggacttgaatccctgcagccccatttcacttctcaccaccttccggggtggtttctcgacctcccactcccctaccacctggtgccttagccagccctggctctccctccaaacacctgcccaatgagcactgccaccccatggtgcccagacatgctctccctcctcatccctacctagctaccattgccactcccctcccccagcggggacatgggcataggagcagggagagttaaggttggtcaggtgcacgtgccctatgctatcttggaagggggcttggccatgtggcatctctggaccaagaatgcgccacagcacatttggagggtgaatggtgggggcacaccccttgtccacctctatttcaggcatggaacacatcctggcatgaaagttgcagtcccttgggaatcacctctccaccttgattgccacagtaggccagtgacaagggaagattgacacatcatcccctgctggggcccagtgtcctgtggctggcaggcaggggatcctaaggacatgtgggtgttaaattgtagggtgcacttcctgggcacctttgagggtctgcactgccccagcaaatatccccatgctagaaggagcaaaatattaaatggcaaattttaaaaatgtaacaagatgggttgcaaaagagactacagaggaaagcaaaagttttgtattttagtatcttccatggcacttttcttcctagcttttgaacaaggggccccacatttttatttctcactgagccccacaaagtatgtagccattcctgcccggagtgaggacttttaaaacataaagattatcaagtcttggaaattctgattcagtagatatataacaggtctcaaacttaattatgtaaagaatattctggagagcttccttttacccagtcccacccaccaaatattctgataaattaagcttcgattagcccccagatctgcattttataaggatccccagatgattctactgcaattggtccacagaccatgcctggaccgaatttgggtgcttaggagcacaaattctggagccgggcagacttgagtttgcttcctagctttaccaactgatctcaggggagttaatgtttacctctaaactttagctcatgcatctataaataaatatattaatatcatgtcataaggatattatgttgtattaaatgtctttaaaacaccacaatgattagcccaaagtaaacactcaataaatgttcaaaaatttaggaaaattgttaagactgggttgtatgcacactggtgtttattatattatgtagttttttctgtatttttacaacatttcagaattaaaagcaacagctagaaaaagagggaaatggccgggtgcagtggctcacgcctgtaatcccagcactttgggaggccaaggcgggcggatcacgaggttgagagatcgagaccatcctggccaacatggtgaaaccccatctctactaaaaatacaaaaattaactgggcatggtggcatgcgcctgtagtcccaggagaattgcttgaacctgggaggcggaggttgcagtgagccaagatctcaccactgctctccagcctggtgacagggcaagactccgtcaaaaaaaaaaaagagagggagagccagagtatgaaaaaggaagtcagagccctttaatgagtcagctttgtaggtctccaggtaggaggctagtgcttcagtgtctaggacatagtaggtgttcagtaaattaaattcaggacaaaaagaacatgccccaaggaccatctgatatccacttaaagtgatggactacctcgtttcccttgtttatgaatgggttcatgcctaagactgtgtgcactttaatacaagggcagtcgttcagaactagtcaggtcctgaaaaggatttaccaaatgttgagtgtgccctctagtgttcacacttcccagctttcttcctataaaggtggatcaaggcacttgcttacaactggaactgaaatcctccaagtcgatctagacattgagatggagaaaatattcattgtcgactgtaattatgcaacgaatatccagttgagataatggacttgcctcttatctaataatacccaggctcaatgcgtcactgctttgtccactttgcccaaaattcaagcacagctaagttgatattttaggacaaaggcagcttactatccagccagaggggagtagaatatggttaagagagagtggaaagaatgaatgagccctgctattcctcactgcctggatggctataagcacagcccttatggaggccttaggtcttgcttcataatattccagtttgaaaagggtttgaaaagacctcctagaaaaatcagtagtttttctcttttgagtaacatgtagcaaaaaaaatttcatcatgtaggtacagggaacaccctaataactattaatctcaaggagtcaagccagtgtgtttcctaatgtatctgctgtatccccatgaagcaaattttgccatcagagaaactgactcatggggaaaaaatccaaggacctcaaatcaccaaaagaagccattcctcagatttgcctaagcttaagcttccctgtctctcattgtgtgttgctttcaatgcagttacataaatggcttttttgtttatgcaccaaaaacactaattcatctgcaaagctcacatttccagaaacattccatttctgccagcacctagaagccaatattttgcctattcctgtaaccagcacacatatttatttttttctagatcaaatgtattatgcagtaagagtcttaattttgttttcacaggttgttttgaatggtaaagttgatgcattctgtggaggctctatcgttaatgaaaaatggattgtaactgctgcccactgtgttgaaactggtgttaaaattacagttgtcgcaggtaaatacacagaaagaataataatctgcagcaccactagctctttaatatgattggtacaccatattttactaaggtctaataaaattgttgttgaataaattgggctaaaggcagaagggtcataatttcagaacccacgtcgcaccgtcctccaagcatccatagttcttttgatatacccctattatcactcatttcagtgaggtacaattagttcttgatgtagccatttccataccagaaggccttcccaaaaatcagtgtcatgtcaccgatccttttatctctggtgcttggcacaacctgtagcaggtcctcagaaaacaaacatttgaattaatggccaaatgagtttgtgctcaaaaaaggggtgaggatacttgaaatttggaaaatctaggataattcatgactagtggattcattatcaccaatgaaaggcttataacagcatgagtgaacagaaccatctctatgatagtcctgaatggctttttggtctgaaaaatatgcattggctctcattacatttaaccaaaattatcacaatataagaatgagatctttaacattgccaattaggtcagtggtcccaagtagtcacttagaaaatctgtgtatgtgaaatactgtttgtgacttaaaatgaaatttatttttaataggtgaacataatattgaggagacagaacatacagagcaaaagcgaaatgtgattcgaattattcctcaccacaactacaatgcagctattaataagtacaaccatgacattgcccttctggaactggacgaacccttagtgctaaacagctacgttacacctatttgcattgctgacaaggaatacacgaacatcttcctcaaatttggatctggctatgtaagtggctggggaagagtcttccacaaagggagatcagctttagttcttcagtaccttagagttccacttgttgaccgagccacatgtcttcgatctacaaagttcaccatctataacaacatgttctgtgctggcttccatgaaggaggtagagattcatgtcaaggagatagtgggggaccccatgttactgaagtggaagggaccagtttcttaactggaattattagctggggtgaagagtgtgcaatgaaaggcaaatatggaatatataccaaggtatcccggtatgtcaactggattaaggaaaaaacaaagctcacttaatgaaagatggatttccaaggttaattcattggaattgaaaattaacagggcctctcactaactaatcactttcccatcttttgttagatttgaatatatacattctatgatcattgctttttctctttacaggggagaatttcatattttacctgagcaaattgattagaaaatggaaccactagaggaatataatgtgttaggaaattacagtcatttctaagggcccagcccttgacaaaattgtgaagttaaattctccactctgtccatcagatactatggttctccactatggcaactaactcactcaattttccctccttagcagcattccatcttcccgatcttctttgcttctccaaccaaaacatcaatgtttattagttctgtatacagtacaggatctttggtctactctatcacaaggccagtaccacactcatgaagaaagaacacaggagtagctgagaggctaaaactcatcaaaaacactactccttttcctctaccctattcctcaatcttttaccttttccaaatcccaatccccaaatcagtttttctctttcttactccctctctcccttttaccctccatggtcgttaaaggagagatggggagcatcattctgttatacttctgtacacagttatacatgtctatcaaacccagacttgcttccgtagtggagacttgcttttcagaacatagggatgaagtaaggtgcctgaaaagtttgggggaaaagtttctttcagagagttaagttattttatatatataatatatatataaaatatataatatacaatataaatatatagtgtgtgtgtatgcgtgtgtgtagacacacacgcatacacacatataatggaagcaataagccattctaagagcttgtatggttatggaggtctgactaggcatgatttcacgaaggcaagattggcatatcattgtaactaaaaaagctgacattgacccagacatattgtactctttctaaaaataataataataatgctaacagaaagaagagaaccgttcgtttgcaatctacagctagtagagactttgaggaagaattcaacagtgtgtcttcagcagtgttcagagccaagcaagaagttgaagttgcctagaccagaggacataagtatcatgtctcctttaactagcataccccgaagtggagaagggtgcagcaggctcaaaggcataagtcattccaatcagccaactaagttgtccttttctggtttcgtgttcaccatggaacattttgattatagttaatccttctatcttgaatcttctagagagttgctgaccaactgacgtatgtttccctttgtgaattaataaactggtgttctggttcataccttggctttttgtggattccattgatgtgaatcagtcaccctgtatttgatgatgcatgggactactgacaaaatcactctgaccccgccaagctgctgccttctcctgccccaacctcacccccagccaggcctcactcttgctagttcctttagttcttttagtcaatatatttttgtcttcgcatataagtataaataaacatatttttaaatttcttggctgggcccagtggctcacgcctataatcccagcacttctggaggccaaggtgggcggatcacctgaggttaggagtttcaggccagcctggccaacatggtgaaaccctgtctctactaaaaatagaacaattagctgggcttggtaatgtgcacctataatcccagctactggggaggctgaggcaggagaatcacttgagcctggggagcagggggtgcgggaggttgcagtgagacaagatcgcaccagtgcactccccatcctgggtgacagagtgagactctgtctcaaagaaaataaataaataaatacatttcttgaggcgtttcttgttaaatcattcatggagaggcatcccaaacactacattcaacaaaacactctgaaaaatgttttcaaatgcaatataacacagcagagatttgatgctctgttatccagttttcatataaggcagtgtgagctgtgtcccagagaggacagtggtctgaatccacctgagacagaattgggtctaactaactgtgagtatggccttcaataagtcactctccatttgggaatttgatttctccacttctataatgagagtatttgacaggatgctctcccaaatcccttgcaattttgttagtctgtgatttcatgtttttatttttattccttcatccaacaaatagtcaaggagtaattgctgtctgccaaataccaacagtattcattaaattgtaattcagattttatatatatataaataatgtataatgtgtataaattgctttgtgagtgcctactacactgctagacagtagttgctcaataattgttagctgaatcagaatccatgtttatcccagagtagcaattagtcttgcatcgagtatcgtgaaagaaggccacgcttaaataagaataatgcctggggtttaggttttatgaaaaaatgaaaggaaattagttctgcttttgttgactaaaggaagggaagagagaagagactataattgtctgcctcagatttaaggaggaggctaattcatgcattaaacacgttacttcaaatttgaatgaccaaaggtctgtagcctcagcacttcaaaattggtaaaagtaagacactctggccttgtttccatagagaccaccccttacaaaggcaccaatgggaaactggcctcaggactcctgttattggtcttctctgtggcagagaaaggagctcttggacccataaatctctgagccacagttctttttgccatgggctcaaaaatgattgaattcatcatgagccacctgtggcatattgccaccactaaacatgtggggcctttaagctcactaagagccaatgtcttcagagccagccctggcttgattctacctagggcatttgcagttgccatataagaatcattagtgctttcaaaattactgtagatactttgcctaaatagactaaaacatgctgccgtcatattggaagtgacagattaaaatagaactcttgccaagtgaaggaaagtgtgctaatataatgcagtcattttaacttgctgtttaagtgtgattgtttttagttcttttgaatattatttgttttatactgacaggaacgaagtactgtccaattttctctgccaaggaaaaaagaaaaggtgttcttccttacttacctgaaccaaaacagaccagtttacaaaattgcctaattataattgctaaacaagttccgaatgcttacagtctaatccaagaatgtcagagctgcaagggcccttaaacaccatccaatccactccactcatttagcagatgaagagattgagggcaacataaggccaggcccaagataacacaatgacagccaggactagagctcaagtctcccaccctgcactttgaaagaataatgctttcaactggagtacattaactctactgtctatatttttagggcagctggggcattctgcattggtggcaatcctctcaacaaccctgggactgaaaactgcctggaattcttactaacaattctctaattgaccaaaaggtgacgaaatcaaggagaccaataaggtagcttggaaagcagagtggcagtcagataacaaactggagcttcaacccctggctcatagcaggttctcagtaaatacatgtaggataaacgtgtggtgctggtgtctggcgtttagcccagctgtgggcactgggccttccagatgtgacatttgactactatagcacattcaacagtgtcatctggcacacagtcattccagcaacaattcaactttattcactgcaactgtgctggggaagacgtgcggcacacggagacagcaggttactccagaagctgtttgagggttgaaggcaggcttcaaaggcccaccgaagctgagattctaacaatgcattgcacctgcggatgattgggaaacagactacagatgctgaaaggcctctctgagtaaagcaatcaggaatcagagctctttttgaatctgaggcttatgccatctaaaaaatctcagggttaaagccataaaaatcagcatgttgtgtaaactgtggaaactattgaaagaatcacagcaggcaaaggactgtgggacccctgctcttttcaatcaatccaggcccacaaatcactctagtcattttttcctacggtagtttcgaggcaaatctttttcatccagtctttggggctatggactgccttgagatttctgagtcaatctcaacttctaatataggtatcaaaagtgaagaagagcaggcagatcttttcttgcatatgtagacaaagaggcaaagacttctgtctggaagaaggcagagacattttctccatgccttcacagaactatttcaaactcctggccaggtcattccactctaataggagagctatccttctattctcttggttaagagaaagctggaaatagaaacagggatattccaggccagacacaatggctcacgcctgtaatcccaacactttgggaggccgaggcaggcagatcacttgaggtcaggagttcaagattagtctggccaacatggtgaaacccatctttactaaaaatacaaaaattagccgggtgtggtggcgcacgcttataatcccagctactcgggaggctgaggcacgagaattgcttgaacccaggaggcagaggttgcagtgagccaagatcatgccattgcactcacatctgggtgacagagcaagaaaggaagaaagaaaggaagagagagagagagaggagggaggaaggaaggaaggaaggaaggaaggaaggaaggaaggaagaaaggaaggaaggaaggaaagatactaatgattccaaaggctttcattcaaacagttgctgcattgtaatgttaagtatgagatactaattcataaaaatttaccaccatagtaaatctccctgataccatcactcttaaacctttagaaatgctacagcatctagcttctctagatcaataatcacagaggcttaagtgctgacctcataaagataaagagttcccatgatttacacattacgtgctttcataaatatctatatataaaagcctattttcctcttggactatattacaaaagtaagtatgcattttcataagattcaaacccagctctaaatgtaagaagccaaattaagaatgtagcaatgtatgaatgaaaaggaaggaaaaaagccattactaaccacaactctgtgcaaaactccctgtcatctaaggtaggaataagatatttatcttgaacacataagggaatatgtcatagaaagggagacagggaggttgaggcaggtgactggcttgagctcagaagttcaagagcagcctgggcaacgtggcaaaaccctgtctctacaaaaaatacaaaaattagccaggcatggtggctcatgcctgtagtcccagctactcaggaggctgaggtgggaggatcgcttgaatctgggaggttgaggcagcagagagccatggttgcaccactgcactctagcctgggtggcaaagtgagaccttgtctcagaaaaagaaaaagaggaagggagggagggaggaagggagggagggaggtaagggagggaggaagggaggaagggaaaggaagggagacaaaaatacaaaaaaaaaaaaaaaaggcctcctgcattcactttcttcctaggctataaggaggtgttttcattaatttctaggaaatgtaaaaaagattagcctaggaaactatggttataaccctggcctttttatctcctgttttgtgtttgtcttctccataagctgtatctacccctcttgtctgtgctttctgtcctcatttaggtagctattttgtttttgtaccttatttttatagattcagctcttagctttcatttcaatctctttctccctatagctattacccaatcaaataaccttgtgataaagtttaatatctgaacaaaactgttgttcttggccacagggatttcgtttctctcaatatgcctcccatattttagttgtctatgttctcttccatacactctgtttctagtcctagatgaacatgcttaagattagaatctccacttccttagtttagaaaatctagatttaagtaacagatatgctaaaaggacaggtgcacattacctaatagtgggattgttataattcagaagtcttagtacactctaataaagaattttactgtacactttctatgtacctagcgttgtatctatttcctaaggtgcaatgaatggtatgctggaactggcatatacaaactaactctcaaaaaccaatgttaaaagaaaaactttagacaaaataaattcaactggaggtcattatattaagtgaaataaatgaggcacagaaagataaacatcacatgttctaacttatgtgtgagatctaaagatcaaaataacttaactcatggacatagagcctagaaggatagttaccagaggctggaaagcgtagtggggggttggagggtaagtgaggatggctgatgaatacaaaaaaatagaaagaataagacctagtgtttgatagcacaacagggtgactatagtcaataataatttaattgtacatttgtaataactaaaagagtatcattggattgtttgtaatgcaatgcataaatgcttaaggtgatggagaccccatcttccatgatgtgattattacacattgcatgcttgtaccaaaatatctcatatattccataaatatatacacctactatttacccacaaaaattaaaaataaaaaaggaaaacaaagaaaaagattcaacagagtttatctgagcaaagaatgattcatgaatggtgtagcagtcagaatcaggggaggttcagagagctctgctgcagcagcctgagcagtgagtttttatgggctgacagagaaggaagacaaaatatatttaactggttagagtggaaataccctagttagaggtgagttgctgatttctgattgataaagtctccagtctccttttactgtttacactgggcttcagtttgcttatgtaggaacttaaagggcttgagcggtccaagtcgggtatccagtggcttcccctacccttttttttttttttgaaatggagtctcactctgttgcccggacttgagtccagtggcccgatctcggctcactgcaacctccaccgcccaggttcaagcgattctcctgcctcagcctcctgagtagctgggattacaggcacctgccatcacttccagctaatttttgtatttttagcagacacagggttttaccatgttggccaggctggtctcaaactcctgacctcaggtgatctgcctgcctcggcctcccaaagtgctgggattacaggtatgagccactgcaccagccacttttttaacaccaattttgcacatcacttcctaacttccagttctgtgtcctcatgttggtagcttgaaatctgccatggtaggaatctttacaccatagaaatcaacaaatggtacaaatagggttttggtgtgtcttttaaagagaatcagttgcttaccatttgccaacatacaactggacacaatataattgtttgactaacaactcgtcatttttgcagtacagctactcaattattgctatgactgagcactaaattcacattgtaaattaaaatataaaggttgtttaagggagcaaaatgttcatgaaatagaaatattgagaaaaccaggcctttaaagatgttcacagatggtaacagatactttgtgttgtaaaataaaatgtaacatttcttaagtgcaaatatttctcctacaacacattcacacattgtaatccaccaaggtttattttatggtatttttctgctgtgccagtatgtcagttcatagtaatttgtaatatgcttataaaaactgtggaaaagagttcttgactgctatttttggtaagcatgtaagaacactaaaactaaaaaaaaaaaaaaaaaaaaaaaaaatttccacagggatgtatggaaggtaagtgtgatgcggtttcactacatttcagtcagggggcacgacattttattccacttttccagtactgaactaaagtgagcagaatgttatacagtgtaaaatgattttgacatttaaaaatgtattcagaataatatcttgaactcccaagtaccagcatccatccatttctcatcttttatttctctctctctctctctcttcagaggtagctatctttcttagtttggtgttcatcattatccagcatgttcatatactttaaccctaaactatccactaaaatatatatttcgttttacatattttaaaacgttatacaaatgctatcatattgtttctatcctgcattttttttcctgtgggattcatttatgatgatatgggtagctctaggtcatttattttagtttctatatcaattttatggcatgatattcaataaactagttatgtaaccttctgtttgtggtaattcatgttgtctctaaattttttactcttctaaacattgctgctataaacattctggcacatgtgtgagccttcgtgtggggtacatccttaggagtaaaaatgctaagccatagagcattcacttcaactgtacttggtattagcagatagctcaccaaagtgttatcaatgtatgctcccagtagtagcatgtacaagttcttgcttcatgtccttcccaacggttggtatttttagaaatatgggcagatttttgagctaataatattcatacatagaatgcctacttttgcattgaatccaggtaatttgaaactatttgtaaatgtatgactacagccctaagtgcttcttggggtcagtaaagaaattattttagcctctaatatgagattacaaaatgtccattatgatatttctcttttaagtcatttttattatggttgtaaagttatggctcacttaattacttaacatgttatcatttggtttcttataacttcccatgtaaaagagtgcattcactatcaaactgtgctataacctatcaactaagacaactcagcccaagtccttctcatgctttaaatttttctgactctctcttctccacttctgcttcattataattttttaaatttactttttttttgagatagtgtctcactctgtcacccaggctggagtgcagtggcatgatcatagttcacagcagcctcagtctcctgggttcaagcaatcctctgcttcagcctcccgagtagctgagactacaggcatgtgctaccatgcctggctaattttttttttttttttttttaagagctggggtctcactatgttgccagggctggtctcaaactcccgagcttaagcaatcctcctgccttgacctctcaaagtgctgggattacaggtgtaagccaccaaacccggccataatttttcatttgttctccagaaaggttgtgtttgtcgcttattttggaaataattaagttagtgagtctgacaaatttttagatgaaatttatctttgaaatggtttacattttgttttgggtgggtttaaggaaagtttcatttagcttaaggaacttaatcttcacaaagttcaacttcattggctgttctcagtacacattatgagtcctatttgatggacacatgcttaaaacacctcctcagaatttaatgtgcttattcatacacgcaaaaaaatgaggtgatcaatatataggggcaactaagccctcaccaaatgcaaaggacaatttaatacttaactacgtcatgaaatttttaaaaatgcattttgaagtaaaaagtaattttttaaaaatctggttgtcacttttactaattgccttttgaacagtataaagagtttagtttttgtccataacaccggtttcttcccatgttttcccataaaaccccttgcaaactgaccagtcgaaatcaatgtgaggaagtgtactgaaatgtaataaaaatgacttgttttgatattttattgcctgagacttgactcattaaacaccgtagagtctgctgccctgcaggaagaaggctcctgtgttctaatacttactaaataataagcattttcctcagtgaaagtctgttgagtgaaaccaggttgatttctgactagacccaaaacaaaatcactgacctgatttctcttcaagtcaagtatttcttctgctctcctacactttccacaatgtattatgaaatttttctcttaagagaatgtaaacgcttagatgtcagggtggcttttataacaaccacgtatttttttagattttttttattattatactttaagttctgggatacatgggcagaacttgcaggtttgttacataggtatacacgtgccatggtggtttgctgcacccatcaacccgtcacctacattaggtatttctcctgatgctatcccgcccctagctccccaccccccgagaggccctggtgtgtgatgttcccctccttgtgttcatgtgttctcattgttcaactcccacttatgagtgagaacatgtggtgtttggttttctgttcctgtgttagtttcatgagaatgatggtttccagcttcattcatgtacctgcaaaggacataaactcatccttttttatggctgcatagtaatacatggtgtatatgtgccacattttctttatccagtctatcattgacgggcatttgggttggttccaagtctttgctattgtgaatagtgctgcaataaacatatgtgtgcatgtgtctttatggtagaatgattaaattcctttaggtatatacccagtaacgggattgctgggtcaaatgtatttctgattctagatccttgaggaatcaccacactgtcttccacaatggaacaactatgtattttatattgtgagactcatgtgtaattttggaaatatcaccaatagcattttacccctcaaacaacacaggaataaaacttgaatacacattttatttttcagggagttctttggagacgaatttaatttgattaactaattcactgatggtgctgatataatttggatgttgttcctgcccaaatctcatgttgaaatgtaattcccaatgttggaggtggggcctggtgggaggtgattggatcatcgggacgaatttcttgtgaatggttcagcaccatccttttggtagtgtcctcatgata

SEQ ID NO: 347 - DNA, 143904 bp, Homo sapiens
aaactctaatttaaaaattatgtttcagaattccaaaaaccaatatgcctaccttccaaaggtgacacaagcacaatttataccaactgttgggtaaccggatggggcttctcgaaggagaaaggtaagcatgacgctttaaatattgcttctagagtaagtctcacatgttgaaatacatggagtgggtcgttttaatcggtttctgtctgaaattatatctaaactctttatctttcctatctatttattcccaaatatttattcagttattcttaaaaaatgtatttttgctttggcttgaaaaaaaattttagggagacttttaagcatcttacttcattataaagatcagttgcttgactttgcatgaagcagattgggcccttctagggctgacaagcccgtgcaagaccacccgctcctcagtgttagtagcgttcccgtctcccaaaaccatgttctcccttgatgctaatggccgggagcacaggcaggtgtgtcgtctcactatggagaataatatttgtgtcattctttacagaagaaggtagcttgccaaactgtctccatctttcccgattcagtcttttgttcaagtaattcacatttttagattttttattggtaatctgagacaagaagaaatttaaagtaatcttcactaagccatgaaagctcccaacattgttctccatgagagatgctggcctgcatttattcaaaaacaaaagacccctctgttgccaaagctcggagggcttttcagaaacgatatagttgtaaattataattttgaatatataaagcaaaaaaatgaaaagtgagaacttccaggctttggattgttgtaggtgataaatataaaatgggatttctggggggctgctactgagatgaggggatggcagaaaacatggaagcaaggtctctggtcagcccagggtgctgggcttgtcccaacaccacgtaggcaataagaggacagtacagggtgccgtctctctccctcttcctctctctgtctctctctctctgtgtgtgtgtgtgtgtgtgtgtgtaacactaccttcccaatttttactgtctatttgtattcaaagataaggtccttatgaaaaatacactgctctgattcactttaaaacttatttccatatttattatttattgtgggaataataatattcccaatattattatttattatttaagttattattattaacttccctctgaggttatatattggttactcacaggtgaaatccaaaatattctacaaaaggtaaatattcctttggtaacaaatgaagaatgccagaaaagatatcaagattataaaataacccaacggatggtctgtgctggctataaagaagggggaaaagatgcttgtaaggtaactcatgagattatgaaaaacacaataggctgcttgagaaaattcatttcaaaatatattttccaatagcataattcaatcatagtttttaaaaaaattcagagacaaatgatctgataaattgataagcaacttttaacaaattgaatatacataatatatatttatattatttatgatatatgtcacaatctatgcatgtgctatttaagaggggcaaatatacatgcaataattgtgctagaatataaaaacattagacttcatcattgggatgatgatatcaagatttctttgttagatttatttcagatagaaaaggggatacgaaaaatgcaggcacatgagatacttggagaactttaagaaagagtgagtgtgtgtgtgtgtgtgtgtgtgtgtgtgtgtgtgtctggcaagcaaggtcttgcacacacacagcactttgggaggccaatgcaggtggatcacttgagcctaggaatttgagaccagtctgggcaatgtgatgaaacccatctctacaaaaaaatatgaaagtatctgtgtgtgtgtgttgctgtgtagtggactacagaactttagaggcagtcacttatttgaatcccattgtcgtaactttctactattttatttttccactgtgactcagggagattcaggtggtcccttagtttgcaaacacaatggaatgtggcgtttggtgggcatcaccagctggggtgaaggctgtgcccgcagggagcaacctggtgtctacaccaaagtcgctgagtacatggactggattttagagaaaacacagagcagtgatggaaaagctcagatgcagtcaccagcatgagaagcagtccagagtctaggcaatttttacaacctgagttcaagtcaaattctgagcctggggggtcctcatctgcaaagcatggagagtggcatcttctttgcatcctaaggacgaaaaacacagtgcactcagagctgctgaggacaatgtctggctgaagcccgctttcagcacgccgtaaccaggggctgacaatgcgaggtcgcaactgagatctccatgactgtgtgttgtgaaataaaatggtgaaagatcacgattagcaagtgttttcttctggttgtgaaacagaactgaaagtaagtggttgaggttccagcacagttcctgggatccctctaattgcactgcttcctctggaactcagtatatctcaaagatgtaatttcctctccgtgctgcacctggtcggccactgaaacccactattgcctgcttcacgtgtggcaaagagctagcgggcttgggttttgttctgccgagaggaagggagaacacccacttttataagaaagagatgggttacctgaacccatgggcacctttgcctcttggcctcctaactttgctaccagggcatggctaggagggtccaggctgcgcgtgctgaggagctcgaggggctgcagcattgcacagccttcatggcaggcaaggaatctgctttgcaaggggcattagccctggaggctcagtggatatgggctattgcaatagtaattcaaggagcatttttaggcctggcgtggtggctcacgcctgtaattccaacagtttaggagatcaaggcaggtggatcacttgagcataggagttcgagactagcctggccaatgtgacgaaaccccatctccacaaaaattagctgggcatggtggtgcgcacctgtaatcccagctcccccagaagctgaggcaggaggaccgcttgagcccggggatgtcgtggctgcagtgagctgagatggcaccactgcatcactgcattccagcctgggcaacagagtgagactgtctcaaaaaaaggaagcattgttaggtataaattattattattattattattagtagtagtagtagtagtagtagtactgagacggagtcttgctctgttgcccaggctggagtgcagtggtgcaatcttggctcactgcaatctctgcctcccgggttcacgccattctcctgcctcagcctccggagtagctgggactacaggcacccgccactgtgcttggctaattttttgtatttttagtagagacgggtttcaccatgttagccagaatggtctcgatctgctgaccttgtgatccacccgcctcggcctcccaaagtgctgggattacaggcttgagccaccacacccagccctgttaggtataaattatttcataaaattcagacttgtaaatttatggtagcctttggaatgggtgatagatgtcctatgccacacaaattcctcacatgccgaggctcaccgtaactgataccagctcgcttgattcagttcagttaaactgaacaacatttacacagaattggcgatttacaaaatcttatgtaagttaagtagaaaaacagaaaaaagttttctgaaagagtttgggtttttccttcaatgctcaagacagaggtccccaacctttttggcaccagggaccagttttgtggaagacagtttttccatggaccagcatggtggtgggggatgattctggaatgattcaagtgcatgacatttattatgcactttatttctattattactacattgtaatatataatgaaataattatgcaactcaccataatgtagaatcagtgggagctctgagcttgttttcctgcaactagacagtcccatctgagggtgatgggagacagtgacagatcatcaggcattagattctcataaggagcctagatccctcacatgtgcagttcataacagggtttgagctcctatgagagtctcatgctgctgcggatctggcaggaggcagagctcaggcggttatgcttgctggcctgccactcacctcctgctgtgcggcctggctgctaacaggccatggaccaggtactgttctgggccccgggggttgggaacccctgctcagagacacaccgggtggtaggaggagctaaaggtggagagggtgaaggaaaatatgaggtctgggctatccacaaaccagatagcaggaaactgaagagttaaacatttacttcagaattgaatggcttttgtaaaatctggctagattccatgaaacgattttaaaaatgcactatttaaattttgcctttgcatgcgatgaagacattagtctttgttcatgtggatgtttttttatgtttaaaagggaaaaaatggtttgcaatgaaacttttatctcagtctttgagtattgatcatggggtgttggaacaggactttggaatgcttgcagggtaaacctttggcctctgttagtcagggaatgacctagtttggcaaaacagaggagagttttgaaatatggaactttcccgaggcatacattgtcattttaaagtggtcaatcaaagcccagtaggactgggctggtgtcttggtgactcactgtgtgctcatatacaggggtaactgaggagcccttcacacaggtctagcctcgtgggactaaaaagtgtgacatgggctaggaaaatgcgaggctgggatgccttcactcccatgaggaagcgtgacgggaggaggcgtgggccactggcagttctacttcacaaaggctgctggcagtgtcaatcctgcaagctggccttgccctcctgtggcggcagtgtacacgtggcatgcaagcacatgcacaagccacctggctccaaggtcagccaagggctccaacatctgtctcagtccctgccaaggcatgggaaccccccacgtaaacttggaacttttcctttcaattgttgcttatgtctgtcactttacttgactgtgagcagcttctagggaggctctctcattcatagtgcatatcatgggcatccagtaaacggctaatgatgatgatacacctttattacaaaaataaaggcaatggagactgaagaggtgaaatgattagctcaaggtcactggcaaggacagagctggaacaaagctcagcattcctatgccaggcaatgtcctctcactgatatccggttgcttctcactaggagaaggatgaaagatgacagagcatttataaccaccatttgttattttcattatcaactgacactggtgtttctctgcccggagcgattttgtcctcccttcacctcaggaaacattcggcaacgtctagagacacttttggttgtcctaatgggagagggtatgcaactggctgtagtgggtagaggccagggatgcagctaaacatcctgcagtgtgtgggacagcccctcgcaagagagagttatcctgccccaatatcaataatgccagggttgggaaagcctgatctcatgtcagcattaaaaccttgtaatgaaaagaggacatttcggccgggcgcggtggctcacgcctggaatcccagcactttgggaggctgaggtgggcggatcgcgagatcaggagatcgagactatcctggctaacacggtgaaaccccgtctctacttaaaatacaaaaaaaaaaaattagccgggcgtggtggcaggcacctgcagtcccagctactcgggaggttgaggcaggagaatggcgtgaacccgggaggtggagcttgcagtgagccgagatcacaccactgcactccagcctgggcgacagagcgagactccgtctcaaaaaaaaaaaaaaaaaaaaagaaaaagaaaaacaaaagaggacatttcaggaacagcaagaaaggggttgtaggacatggcgggctgtgccctttctcttcctttattttttactttttgatacattctatttgtacatatttgtggggcacatgtgaaattgtgttatgtgcatagaatgtgtaatgatcaagtcaggatgttggcatacccatcacccaaccatttctatgtgttgagtacatttcaagtccttttctagctatttagaaaactataataccttgttgttgactgcagtcaccctactcttctgtcaaacattagaaagcattccttctatctaactctgtggttgtaccccttcaccaacctctcttcgtcctcaccaccacccccccacacacacccttcccagcctctcgtaaccaccatatactctctacggccatgaaatcatctttcgtgggatcatgcaatgtttgtctttctgtgcttggcttactttacttaacataatgacctccagttccatccacattgctgcaaatggaatgatttccttcttttttattgtgtccattttcaaagcaagttctgaaagacaagagaaggagctctgagagttgattatggccatgcctgagaaggggtctcagtcaactaatgccgttgtggacattcctgtcccaagcagaaggctttaggtcacaatatgtccaaatgtccaatacatctcccacctatgatccattggaaagaaaacaaacctcgggacccccaaaatcactaagccacatggaaaagtaaagctgggaactgcattgggcaaaccttcctcccattctattcctaaataaaatagctttcttaagctataaaaaaccttttttaagctttaaaaaggttttaaaaagctacattcctcacaatttgcccatgaggaaattccttgtggaaaaaggacaggcagaagtcagagtcacccctctgctgacatgagacaggtgcgtatctgattgcctcgtttgccatattgtttcactgggccacactaaggcatgagtgactattcttgtaaattgcgtatttggtgaaaggctaattggaaactcgaaaaaatgcttctgtttgtctcttatctacctatgacctggaagcccccttcccttcttcgagttgtcccaccttttaggaccaaaccaatgtacatcttgcatagattgattgatgtcttatatctccctaaaatgtacaaaatcagcttgggccctgaccaccttggacacatgtcatcaggacctcatgaggctgtgtcataggtacatccttatccttggcaaaataaactttctaaattgattgggacctgtctcagatactttttgatttagaatcctaacttctgacttgtacttgggtctctgcagactaacttctatattcttcctaagactttgtctagttattcctcattttcatcagtcttcgaatattcaaaaacatttcatttcattgaaaaaaaattgaaaaaagtagttgatatcagaattttaaactgcaatgcattagttgaaaataattttttaaggatatctatggtcagtttaaaagaaaggtctatttaatctcaaagagtttctatgtagtcaagacttttattctaggctgggcacggtggctcatgcctgtaattccagcacttgggaggccaaggcaggtggatcgcttgtgcccaggcattccagaccagcttggggaacacagcaaaaccctgtctctacaaaaaatacaacaattagccatgcggagtgacatgcggctgtattcctagctattcaggaggctgaggtgggaggatcacctggtggctgcgttgagtggagatcacaccactgtactctcgtctgggcgacaggagtgagaccttgtctgaaaaaaaattattctacttttatttgaatagacaaaatttttttgaatcctgatactatttcaaagaccttaaagatttcactaactagctaaatcaaacttaggaaaatattatttggttttccagtgaagcatttctcttatttagagcctttctgtttctctcaatagggttggagagttatccttatcttctttttattggggcttaagaagagagatgaggttccatggagtaaacaatacaaggatataaggacctcatataatctcacgtatccattttccatgaaagccattcttggcacgaatttgccattctatgtttgagcctcataaaaggcaatgcatcataaatatgcactttttgggtagctggaatgtactttaaacgggaaactcaagaaaacagctaggaactctttatgccaggataagtcaaatgcactggcaatagatcaaataaaaatatctgagtaaatgccttccagatagaacatcaccctagttcttcagcactttacaaaaagatctgttctcagttcacattctcttaattccctgtcatttctccccggtcttccaaatatgttttttaaattatgattccatgtataaacacaagatcgtattttgcttttctatgaaaaattgagagccttctctgaaccataaacgtatctttctccaaaatgtattcaaatcaggcatattgaaaactgttttgtgttcgtgttgtgaggttttttaggggaccgcacagaaaccctcagcactagttagtgccttgtgttctaaatgaggaaacggaagccaaggacctgcaggtggctggggactgtgcacaggctggttccgctcaagtcacatgactcgtcagccagtgagtaggtctgggtagcagttggcatggatgaacatgccctccataggctttcagaccttcttcaaggccaaagggaaggccttcatggaaatataattatgtgaaacaccccagaattttttcacaaactttcctgcctataaacgccaggtcctaccactgtccagtgtcccacttcccactgtccagtgggaagactccctccaggacaaaaccaccctttccttcagggatgtgacgtgctgtgctttcgttgacagtcatgcagctgctagacatgtcacttcctagctctccattcgggtctgtgtcccaggacctaaagaaagctaaaagaagccgggcgtggtggctcatgcctgtcatcccagcattttgggaggctgaggctggcggatcactggagatcaggagtttgagaccagtctgaccagcatggtgaaaccctgtctctactaaaaatacaaaaaaagaaaagaaaaaagaaaaaaaaataagctgggcgtggtggcgcgggcctgtagtcccagctactccggaggcggaggcaggacaatcacttgaacctggaaggcggaggttgcagtgagctgagatcgcgtcattgcactccagcctgtgcgacgagagactctgtctcaaaagaaagaaagaaagagagaaagaaagaaagaaagaaaagaaagaaagaaagaagaaagaaagaaaagaaagaaagtaagaagcaagcaagctgaaatagcttatttttctgttttaaaaaatagacttttagtgttcacaagtaagaataaaaaaaaaaaaagcttggccttaggaggaatcctatctgcttaggcctctgagaggcagcgtcacctgaagggaaactgactgggcaagagccaggctcttaggagctgtctgtactttgcttcccatccgtccgctctcccccagcagccaaagtctcctccctccattatattgcaaatcaatgaatccattagactttccatgttttctttttagactttgagattcaaggtcagctagaattaatggttaacagctgacaggtgaaagtgtggttaaatgcagctttggctagcaggcacacaggcaaaatcaagttctacatctgtccctgtgtatgtcacttgtttgaatacgaaataaaattaaaaaaataaattcagtgtattgagaaagcaagcaattctctcaaggtatatttctgacatactaagattttaacgactttcacaaatatgctgtactgagagagaatgttacataacattgagaactagtacaagtaaatattaaagtgaagtgaccatttcctacacaagctcattcagaggaggatgaagaccattttggaggaagaaaagcacccttattaagaattgcagcaagtaagccaacaaggtcttttcaggtacagtttcagaacttactatttaacattcctctcaagcaaatacgccttgaaatgctttttttaaatcataggaatttaaaaacactttacaatagagaatgattgatttttaaaatgtgtctgatttagctttgtagagatgttccgctaatatccataactaatctgagaggaaatgtggaacaacagaagagtaacagtgtctactcagtaacaagcgttttacgagttaaaaagacatccaaatgcagtactgaaaaatcagaagtcttgatttgtctcactgatgactccgtttttcctagagcagtctgtttaatgcttactggagataaatagatttataggtgaccaagacaatcgattaatgtatcagccacagacttttttaaatagaaaattttctaagtaggaaatcattcatagctctttgaaagatatagggagaggcctcaaggaaagaaagaaaggaaaaaaattgggaaaggaaacaaagatgaaaaattggggtggggagagcggtcagatggtggccatgagaaggatctgaacacagagagcggcggggccggcggggaaggagggaggaggggagagcgctgcttccctgtgggttccggcttctgcagagctgtaagagttgaatgccacacacagtcacactaaggaatgctccaggattgggaaagaaaattcaacattataatgagaacactgtgaatgctattgaattaactactcccctctctccctatttcttgtaagtcttagtgtcagtaaactaattataaatttacattttatgttctaaaagcatgcacctttttctcattgtaggatgattttcttatatcaagtggtacatttcattttatttacttcagtttctggtggtaagtagagtgttatcttaactatgggctgggagagggaaatcacactgcaatctccacacatgtgggagaatcccacaccatttatgccgggaaggaaataaaatgtttttattaacttcctgcctgaggctccagaggttttcaaagcagggtaggaattgaggtgaaaaaattgtttgtactggtaggaatctgtgtctatatgtgtaccatatctacatccatgcctacatacatcattcatttaaatgatatttaaaagcaatattaaaaagaagaaatcttgatttgcctcactaattagttggtttttcataaagcagtcagttcaatggaacatacacacacacataaaataggaattttgtactgaaaaatgttatgtaactattcatacacagtttatgcatttcaataatttaactaccctgttaattctccaccctatgtcacatctgctaaatttgtttataaattacttagccaatattaagtaggatatatcagtacaggtattgtttagttccatgaccattctttatttaaaatgaaagctgaagcattcctttagaaaaatagcttatgtctacatgttatatttaatttctgatactattgctagcattttaagcatagtaaattctttttgctggcctatgtgaaaaaaggcaaacctaggtgaagatattaaaagtaaattccacttaatatattaaattacacagctcataatttcaattttctctgtgacaagactactgctcaggttataatattcctttgttataattatctggaaattgtattgttatttcattgataaatatgtcagcgctaaataatttgatatattttgaacactggacccaataactacataaacaattgaccctgaatcaggggttccacatccatggatttaaacaacattgaagtgaaattttttaaaaaaaattatatctgcactcaacatgtgcagagttttttcttgtcattattcccgaaacaacacagtataacaacaatttgcatagtatttacattgtactaggtattataagtaatctagagatgatttaaagtacacaggaggctgtgagtaggttatatgtaaatactatgccattttctatcagggacttgagcgttcatggattttggtatctgcaggaggtctggcagccaatccctcatagatatcaaggaatgatagtgtacatatttaggtcctttatacatgcacatggaacatttacaaatattgaccacacacaagcctctgaaacaaggctcaacaaattttaaggggttaaaattatactgatcatgttattcaatcaccgtgaatgggagctagaataataataaaaagggaattgaaaatctgcaaacgtttgaaaattgagtatttataatcaccgtgaatgggagctagaataataataaaaagggaattgaaaatctgcaaatgtttgaaaattgagtatttatacctttttagattaagatgaatcagagatgaaatcacaatggtaattagaaaaggaattgtacaataatgaaagtacagtatatcaaaactttgagatgtaaccgaatcagtgttgagatcaaatgtatagatttacatgtatacattagaatacagaaaagggaaaaattaatgatataagatgacaagaagatagagaatagcaacttaagtgctaagaaattagaaggcagaaagaagaaatcgcagaaattaattaaatggaagacacacatatttgagaggtcaacataacccctttctagcccattttataaggtcagggtaatcttgacaccaaaatctgataggaaaattctgaggaaaaaaagtcacaggtcttttatcttatgaacatatgtacaaatgtcctaaacaaaatattatccaacttaacccagtagattgttaaaaaaattaaaggatgattacattgtgatattgtgacaaagttgggtttattccaggaatgaaaagttgatttaacattcaaaaatcaatagatgtgtgacttcggggtacataccgaaaaaaaagaagggaaagcaggaactcacacagatatacttgtacacccatctcatagcagcattattcacactaacccaaaggtggaagcagcccatgtgtttatcaacaggtgactggataaagtgtggtacatacatacaaaggaatattactcaaccctaaaaagaaaggaaattctgacacatgctatgacatggatgaaccttgaggacattacgctaagtgaaataagccagtcacaaaagaacaaatactgtgggatctcactgataggaggtacttagggtagtcaatttcatcaagacggaaattagaacagaggttgccaggggccgaggggccaggggaagggctgagggttggtgtttaatgggcacagagcatcagctggcgaagttgaaaagttctggaggtggatggtgctgatggttgcacagcaatgtaaatacccttagtgccacagaactgtacactcaagatggctacatggcacatggtatgctatctgtcataataaaaaataaaaataattttaaatgttaatatgtgccgaaaaatgcttgctaaaattctattaatgatcaaaactttaaataaactggaaatggaagagaactttcatcagctattaaacgatattttaaacaaaagcaaacaaaaatccaaaccaaaaatcttcaagaaacataatacgtaatagcggaatattgaaagctttcccaagggattgagaataggacaagaatacttcccattatttccatttactcttgactggaggtactcgttggtgcggtaaggaagggaaataaaaggaaaacgattaggaggaacataagctctcgtttttcacagatgatgtgattgagtacctagaaaaatccaaaattaaccatcacataaattatttgagccaattaattaaatgagtaagaagtctcgatacaacgtcaatatacaacagcaagcacttgctcgttcgcaaaagcagatgaactagtttttactgacactagaagcagcatgtgttccatgtgttccacatccatgcactcaaacaaccttgacgtgaaatattttttaaaaaattgtatctgtactcaacgtgtgcagagtttttttccaaaattgttttccaaaaatttttaaatgtttatatgtttagggggtgtaagtgcagatttcttacatacatatattatgcggcggtgaagtgccggcttttggtgtacccatcacccaagtagtgaacacagcctccaacaggtaatttttcaacgctcaccccactcccatcctcccatctagtggcatattgaaaatcaatttgtcttgtaaaattaaataatccaattaggagggggatatattctaaggaaattagtgcatgatgcacacacacacacacacacagaacacgtgtgtgcgcatgtgcacatgagagagagtgagagagaaactgggtcttgctctgtcgcccaggctggattgcagtggtaaaatcacagctcactgcagcctcaaactcccaggctcaggagatcctcctacctcagcctcccgagtagctgggattacaggtggaaacaaccatgcccagctagtatttttttttttttttgtattttttatagagacagggtcttgccatgttgcccaggctggtcttgaactcctcagctcaagcaatctacctaccttagcctcccaaagtgctgggattacacgcatgagccactgcgcccactccgcattattaaatatagaacatttatttgattcatcagttaatattcttcttaaaagtactattttaatgtagcaagattgctttccaccaaaaggtggggtttccacggtggggtttccaaattattctcaatggggtgaggatgtgtgttatcacacccccgagccatcagatgctgtcagaaagtgatcactctgaagtctttgtttcaaataagcacagggtttggataaagagacgcaattaggaaaggaaaaagcagaaggctcgttccagacctggatgagatcctaaaaagcagcagcttttgccagtaaagatccttgaaatgattcaattaccctcaaagcactccttgtctccaagacaatcactcataagcacaattccattgaagccaacgtaccattttgtgattttcgtttccacctgaggctgttcattcaataaactcacataaaagtgtttattgccttgatttccaaattcaggcgtatttcctggtaagtagagctacttgccttgcctttatgagattaccacctaactagatgtatgcccagtaaaatccaacataacgcatgccatgtactacatcacagaatgtgtgactcagttgttgaaggacacctgctttgaaggaggggacattactacggtcttcacaccaagcgccaagtactgccaggtagtctgcacttaccacccaagatgtttactcttcactttcacggcggaatcaccatctgaggatcccacccgatggtaaatgcttatgtttctacatcgaggagacagatttttaaagggagattgctattcttaacacatttccatctaacattttataaaatttaacattaacaactggaagataaattgtctttcagttgaaatattgttacagaaagaagtgatggtgtttacgcaatttagaaaagaataaatatgcctccaagtgtagactttccagcctctcctatagtctcatattaatggtatgtttcttctgtttgtctcaatttttacacttcttaaacatttcacactttgcttttctatcgattattaatttttgtcgtgcttctcaacaaactggaacttctcccaactattttattagaaaaaaataaaatatttaaaaagaaaatttgaaaaaaagtacagtacagtgatccccctgccaccaccaaaaccgcaatgtttgctatatttgtacagcaatatacaatatacaatacctatatttgtatacatgtttaaccgtttgaaataattttaaaacatgacactttacccctaaatacttcagcatgcactatcctacacaaaagacatacgaaatttaacaagaattcctttatattatttcagttttccctcaaatataatttatagtaattaaccagaatcttaccaagagtcactcactgcattgggtggtttgtcaggtttaaaacattttaaacagtccaccaaccatttgtattcccatcctgagcttgaaaatttaataataagcctttctgtagaattaagttttcaacatctttattattgctacattcacaggcatttatgtagcacccagaacttataaaatttactattccagaacctagagcagggattggcaaatgtcttcttaataacgcagagtaaatatgttaggctttgtgggcaaaacccacagtaaagccaaggatattatttaagtatttatgtcaccacttaaaatgtaacaatttgaaaatataaaaatcattttgtatagctaacaggctaaacagaaacacacagatttttggttgcattttaccaacaggtcctagttgacacattcctgtttgttcctattagaaaggagtattacatgcagtctcttaagtgtagggatattgaagtaaaaaacaaactcagaatcttgctaagaaaatatttgttttggcatgagataaagtagtttgtttccttctttttggctttctgtgtgctgacttttaagatccattattttaaaaacataaattcctattcattaatatgtattttttaaaaaaacaggtttacttgtgtcctgaaagacagtgttacagaaacactgccaagagtgaataggacagcagcgatttctgggtattctttcaagcaatgctcacaccaaataagcggtaagatatgttctcagaatcaacaaataccagctgtgatgtacacatatcgccacatcggatgtggttttaaggctatgaaatgaaacactgctatgtggaaataaacccccttaatgaagttctttcagtgtagagtataaactagtatacatacatgcctgccctccaacacactgtaaaaacctctttacctcatagaaagacatatcttactacctcacttcccatcatttatttatattctttctatttcccagcctaaaatcttaaatgaaagtctttttttttttgagacagggtctcactctgttgtccaggctggagtgcagtggtgcaatcacagctcactccagcctcaacctcctgggttcaagtgatcttcctgccttagcctctggagtagctgggaccagaggcatgcaccaacattcccagctaatttgttcatttttcctagagacagggtctcactgtattgcccaggctggtctcaaactcttggcctcaagtgatctgcccgcctcggccttccagagtgccgggattccatggtgcccagtcgaaattctttattaaacgtattaatccaaattgaaaggagcaaatataaaggttgaagtgacacttgtcttaatagtgaatagatacttgaatcagttaattagcgaaataatcagtgcagttagggagaagagaggctaggtcagaaaatcaaaatgtgaatttacaagtctaaaattgttacagtgtaagaaggacattggcattcttttactgcttccattcaagaataagaattttgcagattaatataacgaaagacctctgaggaaaggtgggtgaaaaagttgaaaggatgagtcaggagggacagttgcttaggtcattgcccctagaatctggaaggtactcatgtcttctgcttttatttccagcttgcaacaaagacatttatgtggacctagacatgaagggcataaactataacagctcagttgccaagagtgctcaagaatgccaagaaagatgcacggatgacgtccactgccactttttcacgtacgccacaaggcagtttcccagcctggagcatcggtgagtgagtcccaggacattcgagtggtcgatgaaaaacagaatcgtgatttactaaaaagcttttgccatcaactttatgccagaatttattttgaacccctaaaagacatttctataatagtactcctagttttcttcatgaaaaatacacttaaagcctaatttggatgcatttcatttatggtaaggagtctatcttttaataacactgtcagaaaaatatatatacttggctaatttcaaaagcgctacacttttaaattggcacttttgaaacagctgcaattggtatgattgtcagtgcccttcccagtctaaaaaatgttacagtctaacagaataaaaataaaaacctactctctctctctctaaataacagttccttacctaagacaaaatactcatgtaaaaagtcttatcctgctccatactggattttgaaatatttcaaggataaatctatcacataaggatttaaaaattatctgatctctaataaccaaatctgtgttctcatctttaaaaatttactagggaaatagattattaatttgtatattcagaaatatttgagatgatttagattttcatagtaaactgcatttatctggaatcaacagaaaagtgaaaaacattcaaattactaatacttgcgttttaacattggattttaacattctgctctccacattcacaaagaggagtgaacagaaagcaaacaaagcatcaacgagttatttcaaaaacaacagtggtgaaaaacacacacaccaaacccctaaattcatgatttgacttgtaaggcttatctttagctcagctcagacgacagcttttatgtctaagacttaacagaatgtgaactgcaagacaagaaattggaggtttctaagcaagataaagttaagtcattaaaagtaagaaggacttagccaggcgcggtggctcacacctgtaatcccagcactttgggaggccgaggcgggcagatcacctgaggtcaggagttcgacaccagcctgaccaatatggtgaaaccccgtctctactaaaaaagaatacaaaaattagccaggcgcggtggtgggcgcttgtaatcccagctacttgggaggctgagacaagagaatcgcttgaacccaggaggcggaggttgcagtgagccaagatcgtgccattgcactccaacctgggcaacagagtgagactccgtctcaaataaaaaaaaacaaaaaatgagaagggcttgagaagtcattcattcatgcactctccttcttcatgtggtcactctctcaagctgtcattatactgaagaagaaataaacttacacaattcacaggtgcttagcaacactgctgggaccatgcccagccattcagcctcccagatggatgcttcggggtctcgcaggtcctctctccaaaggggactttcttaatatctcatgttttttcctccttgcagttggaagaataagacacttttcctttttctttttattcagtaacatttgtctactgaagcacacccaaacagggacaccaaccagaataacgaagctcgataaagtggtgtctggattttcactgaaatcctgtgcactttctaatctgggtaattatcgacttcttgatgatgtaattcaaccattaaatatgctgatgattacagtagatctcactcaggataccagcttatgctcacgatgaaacggacccaaagatctttaccttcttcatgtgatagatttcatcatgtcctatacagttagatcctctatttaaatttccagtttaaaataatcatgccattttcttctaaataaaaaaaaattaaaagatcttgggatacacttaaattttttaatatggaatttacacatactgtgaccggaattttcctgatagctggtgaattgagtccctgacatagttcttccgtcgcgcagcttgtattagggacattttccctaatacggtgtttgcagacagcaacatcgacagtgtcatggctcccgatgcttttgtctgtggccgaatctgcactcatcatcccggttgcttgttttttaccttcttttcccaggaatggcccaaagaatctcaaaggtaaggagttaacaagtaaggataatttgttatcttctaaaaatagctgatcaaaatccatcattaaaaattccaagtaactaaaaatttactctaaatgtcagtataggataaaagttgcaaagaatttctagcccctctccctttctattccccacctacttaccacaaacccaacattaccgaggactcttttttttttttttttttttttgagatggagtctcgctctgctgcccaggctggagtgcggtggcatgatttcagctcactgcaaccttcgcctcccaggtccaagcgattctcctgcctcagcctcctgagtagctgggactacaggcatgggacaccacgcccagtaattttttttgtatttttagtagagatggggtttcaccatgttggccaggctggtctcaaactcctgacttcaggtgatccacctgcctcggcctcccaaagtgctgagattacagggttgggccaccgtgcccggccagtaaattttaaaataaatataaatattacttcacctaaataaattttaggtacaggtacagttgtgttacatggatatactgtgtagtggtgaagtctgggctttcagtgtagccaaatagtatacattattcccattagataatttctcctgcctcaccctcctctatcctcccaactctctgagtctccaatagctttcattccactgtctctgtgcctgtgtacactttatttagctcccacttaaaagtgagaatctacaatatttgactttctgtttctgagttgtttcacttgagataatagcctccagttctatccatgttgctgcaaaagatatgattttatgatttttttatggctaagtaacattctatagtatattctatacaccacattttctttatccattcatttgctgatagactcttaggttgatccatatctttgttattgtgaatagtgctgcagtaaacatgtgagtgtaggtatctttgtgacatgatttttttttctttcttttcctttggctatgtacccagtagtgggattgctggaggtctccaccttggcaaaggggcagttgtctagttctaaatgaaatgaagagattccatttccatttcatgacaactaaaagacaattcagtccaatgctttgtttaaaataattgaaccaggaacagaaagagctgaaaatgtcagtgaaatgtcaaacccaaagtggagagagagagagaggtggaaatgaatgtctccatcaagtgggttagggtggtggtggagggaggtttgagaattgagtccctgtttccttaccaatggaaattaacataggacatcagaaacagcatggaaaatttctttgattatcaaaagtacactagctaaggttgctgtccctcttttatttatttatttatttgagacagggtcttgctctgtcactcagatttggttgcactgggtgtgatctcagcccactgcagcctccacttcctaggctcaagcaatccacccgtctcatcctcccaagttgctgggaccacaggtgtgcaccaccacccccagctaatgtttgtttttttgtagagacagagtttcgccatgttggccaggctggtctagaactcctggcctcaagcaatccacctgccttggtctcccacagtgcagggattacaagcctgagccactatgcccagcttgctattcctcattgacaacattcacttaaacaagcaaacaaatatccgtaaaattaagtcagctttaaaacctggcttgtatatatctctgaattggaactctcagagccctcagcacttgcctgattggcctcctgttgatgaaaagttgtcctccagacaactcagccaagggaggccctgtgtgccttgcctatcacatgagcctcactttccactgagtgaggctgtcatttcagaagcaccgggtctgtcacatgaaaatatatctgttaccatcacttactaaacaaatttagtagaatttgtttggtgcttattatgtatcaggcattgttctgaaggctggggataccatttagtgaactaaatcgacaaaaactttgcctattggaccagagtggagatgagagagaagtgaccagatcgatctgtgttatcagcagacagccaataagatttgctgataggttggaccacggattgtgaaggagtcagtgatagcaccaagacttttggcccaaggaactggaaagatggaaatgtcaatgacagaatgtggaggatttcgcaagcagcagagtgtaggagaagcaatgcccttggctcatctagggcaaagggttgaattggcaactggaaatagaagtcaaattcagaagagaggtttatgtggacatctgtgtttaggtgtcaccaatatacagctgatactttttaaaaatctagtgaaattatcaaagggttaaatgcagagagggaagaaagtaggtccaaagatcaagccttgggacattggaagtttagaaataagaaagatgtcattgtcacttgtaattttgtgctagtcactgctctttttctttgtcttattaccttactgaccaattcctagaataggaataacacatttgatctttaatacagtatgtgataggaacatggcttctataagcccaaacttggcaatttaaatttaaatttattaaaattaaataaaactggctgggtgcagtggctcacgcctgtaatcccagcactttgggaggccgaggcggtgaatcacgaggtcaggagtacgagaccatcctggccaacatggtgaaaccccgtctctactaaaaatacaaaagttagccaggtgtggtggcatgtgcctgtaatcccagctactcaagaggctgaggcaggagaatcacttgaacccgggaggcggaggttgcagtgagccaagatcgcgacactgcactccagcctgggtgacaagagaaagactatgtctcaaaaaaaaaaaaaattttaaataaaactaaaaattcaccttcccagctgtgttagccacatttcaagtgcccaatagccacatgtagttggcagttactgtattggatggcacaggcatagaatatttccatcactgcagaaagatctatggacagtcttgctctagactgtgattttgtctacttaggaaaagtcactcttttccaggaagatgcttccagggtgtggagtaaacgacggacttcacccatctccttataaacctattgcaaccctggataggaggtttctaggtagcatgaagactcttgaatctttaagataggctgggagtgttgaaaggaaggaaatgaaaagggaagatactaggaagactgacaatagagcaagctcagaaaatttttatggaggtgatttagttagaaaatttgtctgcaacctaagggccatggagtgtgactccatggtttatgggtgtaactccgtggtttatgaagagtactttcaaaataggaaaatcttcacaactaagtgctagcatgagctgactttactttctctaggtgctgtaaaaatgtttttatgtgtttgatatgatatatttctacttcccttttgtttttgttagaaatctttgtctccttaaaacatctgagagtggattgcccagtacacgcattaaaaagagcaaagctctttctggtttcagtctacaaagctgcaggcacagcatcccaggtaaactgagagttctgcattctggctgagagtgaccagccccgaggaggctgatacatgctgagggagggtctcactctgacatgtggtctgctgtctagtgttctgccattcttcattttaccatgacactgatttcttgggagaagaactggatattgttgctgcaaaaagtcacgaggcctgccagaaactgtgcaccaatgccgtccgctgccagttttttacctataccccagcccaagcatcctgcaacgaagggaagtaagccatatgaagggttatgcagacacccttgtcccgtctgcctgtgaggtgcattatgtttataccgttttgtttccaactgcaggggcaagtgttacttaaagctttcttcaaacggatctccaactaaaatacttcacgggagaggaggcatctctggatacacattaaggttgtgtaaaatggataatggtgagtataatgtcacttgaaaaaatatagctgaaggaattattccatgcttcatacatcacaatcaagactgtcagttatagccacagaagggagaacattcaggaaataacaaattttgcaattttctattattttcactcctgtcactcaagctgaccatgttttaaaggtaaatattgaggcttgactaaactgtacattgcctagtattaactaaatatatgctttaatttgacacatttatacacctggcatttctgttttctttctttcttttttttttttttttttttgagacacagtctcactctgttgcccaggctggagtgcagtgatgtggtcagtgttcactgcagcctctggcttgaactcctggactcgaacaatcctcccaccttagctccctgagtagctggggctacaggcgtgcaccacaacactcggctaatttgttgtagagatgggatcttgccatgttgcccaggctggtcttgaactcctgggctcaagcaatcctcccgctttggcctcccaaagttctgggattacaggcttcagccactgcacccagccacaactggcatttcctaatgagacccagactctgccaacactcctgttatcaaggccagtaatctttcctattatcctttgtaagggaattatcgatcagcactttggttagtcaaattactaattttcttccaaaaattgtgtatctattcaagaaatactggagcacctcctttttagggtctttattcagattccatgcagggttctggagacttagggattggcaaaggttaaggtaaaactttactagtaacaatgagtgtggtaggatggaaataagtgtttagattacacgagacctgtaataacataaaagttacaataaaaatccaaccagcagtgtttccatcccagtggccaatttctgagcatagtcacgagagatgctttgtaggcaaacagaattgttctaagggacaaaatccccaacaggaaagaacacaccacaaacactcctgcttaaattaccatagtaacttaggatggctttactatatattgatttacataaagctgcatgttcttatactgtttattgccaaatgtccaatattacaatacactataaggtgcaactgagatttaatgaataaaatggaagtaacaatcctgcctcgtgatagttttagaagcacaaaaacattctgtgtcagattatctgctgtaccgagaaggcgaatcaatccttaatttctgagaacttgttttgtagaacataaagacgttatattgcctccaacactggtatcctaactaacagactatgccttcctagagcttagaggcgctccgatgaaaatctctggatggctcaagacttcttaaaaagcaagtcaattacgtcgtatctcatacattctgttttcctcacaataaatttccctaagacaagaaggagcattcggcaccattctgttgtctttcttctacttctaagcgttagaagggacacttagcaaatgttgctgttaagtaatgttgacatggtttaataaaatgggaatgagcacgtatacctcaatacattgcagactgcattttcccccttccttcttcattatggttttctctgttggatttatagactctggcctgtagaagttacagaatatgccaggtatagattgatagctacaggagaaaatgtaagataaaggaaaataaagtcttacgtcttttcagtgcaactttggagggagtgaattagataactaggtttttactgcgctgtatttgatgaaataaccccctaatgtgaaagggaatagctgcgtgagatatttatggtgccttgtctgtcactggtctacaatgtaacttaactttctgaagatagatagcagcaccattaaaataaacatttcttaccacaaaatatgattctaaacacatattttcagcatttcgtttaaactgagaaacagcataggatgaacctcaaggcctctcacctggaccttgagttatttctaaaatatcttagttactatttacctattaattttcctaaaatttacctttatgacgcttcccaccttgcagaaattccagaatagatggccctccaaaatgaatgttcacccttccggctctaaaatgagagcctctgttcaggcttccgaagtcacatcgtgctcgttctcacctcagttgctgttagctgctgtttccttccgaactccttctctcatcctctcctcctatttgaaatctgccccagaattatacactcattttcctaccaaggaaaaaaaggcctagaaaggttgttttacacccacaaaactagtgaatggaccttctaggacccggcttctcatcagtgattcttctgttaacttagactcctcccttagctcaggacgcggagccttctgagcacctgagcctggttattctaaatgtgatctgggcacagcacattgacatcacctgggagcttgttagaaagaatttcaggacccacacagatgttactgagtcagaatctgcattttgaaagctacacaggcaacccacaggcacataaattttgagtcgcataggtgtgtgcgtgtgtgtgcgcatgtatgtgtgcgtgtgtttgtgtgcacgtgtgtgtgtgtgtgtctagaatactgctgtctacgaacaccctattcccatccatctgtgttccatggctccaaccgggagggtgggttcttgtgtcgggcatccagtaagtagaaatagagggcactgtcctgtctaggcagccccaagagaaaagaaacagagggatgagcctgagtcaaagtccctgaaaagtaccaaggaccccagagaatcccaaactgtcaacaaggccaaaggtcagaggaagttcatagcagatcagtcttactttggacgtgggtggagcaggagtgactgggatcatggtcagcagagtcactgggacagggcaggaactggacaatggctgcagcctgcgggcaaggtgcttgccttttctttctaagagcagttctcaaacgccagcagggctggttcaaacacagatggctgagcttccaggctggagtttctcattcactggatctgaggttgggctgaagaatgtgcatttctaacacgttcccaggtgacgctgttggtctggagactgcacttgacaaccactggtttaaaaacaccattcacgttatcatttgaaggagggtaagacagccttgtagtaccacacaaggagggctacattcttaggggtgtgtaattacaagatgacttagtcaattccatttttcatgtgcatgttttgctttggcagcttgattataaagtctctgtaactcagggtcatgataaactattgacttgaggaaaggttttcttcttgttcctgaaggagcataattactgatggaaaggaagatgtaggaagctgctcatcacaatgcttctgttgcagagtgtaccaccaaaatcaagcccaggatcgttggaggaactgcgtctgttcgtggtgagtggccgtggcaggtgaccctgcacacaacctcacccactcagagacacctgtgtggaggctccatcattggaaaccagtggatattaacagccgctcactgtttctatgggtcagtaccacggctgtttttattagttcatcttcttcacacatttataaaaaatattactagcatgttaggaaataaatactttaaccaattagattgtcttatttgcaaaattaattaattgcttcagtggtaaaaaacgcaaaaaggaagagctcatggtctcccagcatcagaacaggtgcaggtacaaggctgcttgactgcctgctattccgcttcccatttaaccgcattcacatccccaagggccttcatgttattccctgcaagagcatacctccctctgtgcctcgctctgtgcactgtgcccggaactaaactcacagaggatttaccattgtctgaatcaaatttctaatatgtgtgtgtgtgtgtgtgcgtgtgtgtttaaatacagaaagtggccaggtgtggtggttcacgcctgtcatctcagcactttgggtggctgaggtgggaggattgctcaatgccaggagtctgaggtcagcctgggcaacatagtgagacctcgtctctaaaaaatatttaaaaactagcctggcatggtgttttgtgtgcctgtagcaccagctgctcagaagtctgaggtaggaggattgcttgagcccaagagttcaagggtgcagtgagttactacagtgccactgtgctccagcctgagcaacagagcaagaccctatctctaagtaaataaataaaatacagaacgagttcggtatgcatcctcacattggattccttacttaggtcactttcagcgttggccaaacaaaaaggctccagctgggggtatatatattccagggaagttaagttggccaaactttccgtttgctacttcagtatcctccgagttgtttccagacacagttttgtgtgctttttagttttggttttcttttttaatcaatctgcagcacactcatgttaaactcaagaacacatgtgaggccaagagttcccgttacctgtcacatatgggaatggagtagcagaaagcctagtttctgtcacagctagttactggcgagattgagactgagtccagcggtcttcgtgtgtgtgtgtgcgtgtgtgtctgtgcagtgtgcgtgtgtgtgcgtgtctgtgtgtgcgtgtgcgggtgtgtgcgtgtgtgtgtgttggagcacggagggagtgctcattcattttttgtgtataatggattttctttatagggtgaatatgttttttatcccgaaaaatcttaggataaaatcacttttttctacctaaatgtccatcattggcagaaaatattagtaataattaaacagccacacacttcacaatgtctgggaattatttttagtaaaggaaatttctttccctctgttgtttgctccttagggtagagtcacctaagattttgcgtgtctacagtggcattttaaatcaatctgaaataaaagaggacacatctttctttggggttcaagaaataataatccatgatcagtataaaatggcagaaagcgggtatgatattgccttgttgaaactggaaaccacagtgaattacacaggtacggagaattttatccggaaagttgtctccaatggtgaactggataaaatgtttaacactactagacttacggcctgaccctgccaatctctccatgcgttatcatcatgaaagggagagggcctggaatgctagtcattcactctgctaaggctgacacactttcctggctattgaaacttattttgggaatgtgggtaaagagatacgttttcctgagtcttcttcaggtgcatagaatgacataatttcataatactttggaatagtaaagataatttagtctaaagataatttattaaagataatttagggatgaaggattgaaggttagaacaattaagcaacttgtgcaggatcaaagtgagttggatgaggagttagcggtgagggtgaggcttgtctctctctcgccctctcatcctggcacatgtgcgatatcgtgctgaacctgagggaggaaaatacacgacaacaaggcaaaaaatgaatatagtaaacaaagaaaacacagataatgtacagtggaagaagagtctcttctggaaaagaggatatattttgcgtctcatatttaaaccacgattttttaaatttagattctcaacgacccatatgcctgccttccaaaggagatagaaatgtaatatacactgattgctgggtgactggatgggggtacagaaaactaagaggtaaaaatgatgttgttatatgtgctccatcctagaaatgaagagcggaaccttttctgccctgtcaagtcatgtagctgaagcacaactcgagtcacactactcagttgcaggaagcggattaataaagatggagaggcaaaaatcacccaagtgaggctggtgcctcatatgtttgattggaaattttaaatgtgactaaatctctttaaagactaattatatttaatgaagtttaatgtgaagcctagcacttttcagtaaatgttctagcctgctatccaattactttcttgggaagtcattccagttagagtcataattaatttttgaacttaattaacattaacaaaatggtacacgcaatagtgggaataatgtcttcttcatacttgtaattataaaaggtctgtgaagtaaatctaacattttttccttctagatttttatatagacatgagttttgtgttgttgttgttttgagatggactctcgctctgtcgcccaggctggagtgcagtggcacgatctcggctcactgttacctccacctcccgggttcaagtgattctcctgcctcagcctcccgagtagctgggattataggtacccaaccaccaccccaagctaattttttgtatttttagtagagacggggtttcatcatgttagccaggatggtctcaatctcctgacctcgtgatccacctgcctcggccttccaaagtgctggaattacaggcgtgagcccccacacccgtccatgatttttattttaaatatatgtggcccagcaccactggtggctcacgcctgtaatcccagcactttgggaggccaagatgggtggatcacttgaggtcaggagttcaagactggcctggccaacatggtgaaaccctgtctctactaaaaatacaaaaattagctgggcatggtggtgtgtgcctgtaatcccagctactcgggaggctgaggcaagataatcgcttgaacttgggaggtggaggtagcagtgagctgagattgcaccactgcactccagcctgggcgacagaaagagactccgtctcaattaaaaatatatatatatatatatttatatgtatgcatatatgtttatgtgtattgtgtatggttattctacaaacgaaccaaaaaaatttttttcagacaaaatacaaaatactctccagaaagccaagatacccttagtgaccaacgaagagtgccagaagagatacagaggacataaaataacccataagatgatctgtgccggctacagggaaggagggaaggacgcttgcaaggtaacagagtgttcttagccaatggaatatatgcaaattggaatgcttaatgcgttggggtttttttgtttgttttgttttttttgtttgtttttttttgagacagagtctcgctctgttgcccaggctggagtgcagtggctcgatctcagctcactgcaagctctgcctcccaggttcacgccattctcctgcctcagcctcccaaatagctgggactacaggcgccagctaccaagcccagctagcgtcttttttttttttagttttagtagagacggggtttcaccatgttggccaggatggtctcgatctcctgacctcatgatctgcctgcctgggcctcccaaagtgctgggattacaggcgtgagccaccgcgccgggccgcttaatgcattttaaaaagcagtcttctgccaatgagcagggaacacagtgtatttgtttgacttagactgaaatcaaaagcaaggagattgactggatgaacgcaagcacccaggttctctgcagtatattaaggggccaagacaacattttaggcaaaatcagcctgagcaagatgtgctgaagatgggaagcgtctgagttgatctgtgcaccttttcttgtctcccctcgttctagggagattcgggaggccctctgtcctgcaaacacaatgaggtctggcatctggtaggcatcacgagctggggcgaaggctgtgctcaaagggagcggccaggtgtttacaccaacgtggtcgagtacgtggactggattctggagaaaactcaagcagtgtgaatgggttcccaggggccattggagtccctgaaggacccaggatttgctgggagagggtgttgagttcactgtgccagcatgcttcctccacagtaacacgctgaaggggcttggtgtttgtaagaaaatgctagaagaaaacaaactgtcacaagttgttatgtccaaaactcccgttctatgatcgttgtagtttgtttgagcattcagtctctttgtttttgatcacgcttctatggagtccaagaattaccataaggcaatatttctgaagattactatataggcagatatagcagaaaataaccaagtagtggcagtggggatcaggcagaagaactggtaaaagaagccaccataaatagatttgttcgatgaaagatgaaaactggaagaaaggagaacaaagacagtcttcaccattttgcaggaatctacactctgcctatgtgaacacatttcttttgtaaagaaagaaattgattgcatttaatggcagattttcagaatagtcaggaattcttgtcatttccattttaaaatatatattaaaaaaaatcagttcgagtagacacgagctaagagtgaatgtgaagataacagaatttctgtgtggaagaggattacaagcagcaatttacctggaagtgataccttaggggcaatcttgaagatacactttcctgaaaaatgatttgtgatggattgtatatttatttaaaatatcttgggaggggaggctgatggagatagggagcatgctcaaacctccctaagacaagctgctgctgtgactatgggctcccaaagagctagatcgtatatttatttgacaaaaatcaccatagactgcatccatactacagagaaaaaacaattagggcgcaaatggatagttacagtaaagtcttcagcaagcagctgcctgtattctaagcactgggattttctgtttcgtgcaaatatttatctcattattgttgtgatctagttcaataacctagaatttgaattgtcaccacatagctttcaatctgtgccaacaactatacaattcatcaagtgtgattttttttttttttttttgagatgaagtctcaccctgttgcccaagctggagtgcagtggtgtgatctcggctcactgtaaactctacctcctggattcaagcgattgtcctgcctcagtctcccaagtagctgagattacaggcacatgccaccatgcccggctaatttttgtatttttagtagagacggggtttcactatgttggccaggctggtcttgaactcctgacctcgtgatctgcccacctcggcctctcaaagtgctgggattacaggtgtgagtcactgcgtctggccatggaaaatatttattgagcacaattatgtgagagcatcatgctgagctttgaagatacagtggtgagcaaacatatatcctggcttcatgaagattatactctagttaacatgagcaacaaaataaaataatcacacaaaatatataggttcaagctgaaatgagtggctgcaccagattctatgagataagaaaggaagaaggacatttttcaccaagttcaaagactgggatacaaaggaatttgtcctgacaaaggcaaaacaaaaacaacaacaaacaaaaaacccaaaagagcaaaatgacagtagaacataacggggccagatcaaaaatgctgacaggttcccaaaagaataaaatgacggtaggacatgacggggccagatccaaaatgctgacaggttcaaacaaaattggaattgaaaatcagagtgcgttcaagagtatcaaacaatactatcttgttacttgcttattaccttagtagactggaagcaacacttcacacaaaaaaagggtttggatgtaatttcggataagaagagatgtttctgtaaagtctttcctgagaagcatattatttgagaaaaacacatatttctgtttttagtatttcactttgtataatgtcttaatttttgaagagctggtatattcctatgattcattaatgaaagttctataagatataaaatatacaatgaggagatctcctcttctgtaccagaagagtgcacattctacacactgcgtagcacctttctcacttacgttctgtctgggcacacttctgattgacacgcagagggctctctctgtctggggatatttctgatgggtaccgagagagcttcctctatcttgggttatttctgatgcgtagagaagggctgcctctgtccattatggaaggctggtgttcactgcagggattccacacttcatttaaccagagtccccgtggacggacacttgggttgttttcaatctttccctctttcatacacacgcaggaacatttgtaggataaagtccagatgtagaattgctgaagacaaaacaaaacgaaaacagcagatgcatttgtaattttgaatattgccaaatttctcttcaaaaatctgtagccattttttctcccaccagcaatgtaagagagggccacgttccagctaccataacaccacaattaggaatttttgacaatctgacaggtggaaaaaggtagctcactgtagattattttgcagttctcttactatgacaaattaatataaatgacgtgatgttaatgtggtgtataagatcaccaaattgttcaccgcttcattgtttacttaaatgctaatttggtggttatgacgtagacaaacatagagtatgctccttgcagtcatgtaaacatggtaagagttcttgccaaaggacgaagcaaacgttccagagcttatgttgttcaagcttggtagtggctcagtgtggcagacatactggctgtccagccttctccctgtgtgttatggacataaatttggggtacaagtggcctcatctccagttccaggggtggatcctgattcctacacattccctgatggaatcgcatcctcgttgccctgggaatcagttcctggcagtgcaggccaaggcagtgggcacacgccttcaccccaccagagtgactggctcagagtcagcaacctgagcaaaggttgagaatttggatgttgtgtcggaataaatgctttctctttcccttccatgtgaatgaggaagtgttggccctggaagtggtggcacttatcatgagaagctgccggaggtcactgatgcccaggtagaggggctgaggtctgcaccaactctgggcttccctcttccacagcaatggcccctttcattttaagccatgcatttcctaccacctgcagtggaacgtcctgtgtgccaggactcgggttattgatcacaaccctgagtcaatgaaatgtaattgacttttattaggcatgcattttaccatagtgttctatgggacacagttttgtgttttccaattttaaaagttggaaatgttcttgaatagttttgatcctaaagcctcagagaaagtctgtctgtgacccgctccagagctgcctcactttctgacatgagcggtgctcttggacagccggcaacgaagccacgcttgtgaaggacacagcggttctcacctgtggcacccggggcaccagtggctggccactgccctacactctaaagagggaaactaaactttggactgagaattatatatttaagaaagccttcagaaataatacatttacattatacatgactcatttatggccttacctgtggtcctgcctcatgaaagcatcagaggaaacgttccccatttgctaaggggcatgtctccatctcgcctgttcgggtccacttctcccttcatcctcgctttgttctgtgattttccgctcccttcacaggtctcactcagaatgggtctttcccaggccgggtgcggtggttcacgcctgtaatcccagcactttgggaagccgaggcgggcggatcacgaggtcaggagatcgagaccatcctggccaacatagtgaaacgccgtctctactaaaacacacaaaattaaccaggcgtggtggtggcacctgtagtcccagctgctcaagaggctgagcacgggaatcgcttgaacccgggaggccgaggttgcagtgagccgagatcgtgccactgcactccagcctgggccactgcactccagcctgggcaacagagtgagactccatctcaaaaaaaaaaaaaaaaaaaaaaaaaggaaaaaatagaatgcatctttccctttgctcgtgtgagaggattttcaacatcccagcccgcagcatcccagagctcaggtgtagggaatttcccgactgcacggacgctctgccggccccatgtggtcagggcaatcctctctttgaatgtcctttccacaagatgtctgtgaggccacctgtcacctgggagggcttccctttgtccaggcagaggtggtggccacagcatcacggcttcccagtgcgccctgtgagccccaccccaactctcccgcctgcttcccgcctgttgtatgcacgcgtgttcattaaccacagcaggccaagcttctttcaggagaacatttcttccttttccaaggcaatcccacaaactaaaaataactgtttagagcaattcttcaatgaggaatgtccgtgtgtgtgtgtgtgtctgtgtgtgtccgtgtgtgtgtgtgtgtgtgtgtgtttgagagaaagagagagagagaatgaaaatgaaaacaggccgggcacggtggctcacgcctgtaatcccagcactttgggaggctgaggcgggcggatcacaaggtcaggagatcgagaccaccctggctaacatggtgaaaccccatctctactaaaaatacaaaaaattagccaggcgtggtggcgggtgcctgtagtcccagctactcgggaggctgaggcaggagaatggtgtgaacccgggagtcagagcctgggcgacagagcaagactccgtctcaaaaaaaaaaaaaaaaagaaagaaaatgaaaacgaccatttctgatacctgtaatgcttacgcactccagcttcactgcctgtctggtccctgggtttcctcatcttcagatgctgtgttactttcctctggattctgtaacaaattaccacaacccaccagggtggctgaatagcccagatttctccccgtggctctggaggctgtaatgctggaatctcggtgttggcagaactcggctcccttcgaggccttaggaaggaccctgccttgcctcttcctcgttcctcggctgcctccttctccacgtgggcctctcccacatttcttatccctttcttgtaagtaaactagtaatattggttaagaacccaaactgctgtatacggtatgtactatatgcggcacacagtacatagcttactgtcattttccatttaattctaactttcagagaaaagactatattcaaaatgcctcccacagtaacgggcacacatagtgctcaacaaactagttccctctcttttgccttggggtatccggcaactgtcttacaaatgtaacagtgtatggtggacctactgatggagagacttgttcgtgtatgtgtttgtcttacctcatctacccagagaggtgtcaaaatgtatcttatatgtacggatgcagcttttctgctgcacccagcactccccaggaaacatgagcacgctttgtaaccaccggtaactttcaaatgctgtgcacaggtagagattttcacaggctgtggtgactgcgtgggttccttccatgctcagacactgtcaaaacggcagtcagaatgactcccatgagcttggttgggaaggcacctttacaaacaatacagactagaaaacctttgtcatcccacggaaaacactatcaaacacaacacagaagtatgggttttgcggtttagagggtttttcgataagtttctgctgccaccaacggaaataattatcttcactattagaacgagaaagcagtaaagaaagaatcaagacaaaaagtgactttctcagaaatatttatatacttgagcaaattaatatttgatttgggtgaatctgaatgtatttctccggtaatcgcttcattaaaaataaaactgtgggctgggcatggtggctcacgcctgtaatctcagcactttgggaggccgagacgggtggatcatgaggtcaagagatcaagaccatcctggccaatatggtgaaaccccgtctctactaaaatacaaaaaattagcggggcgtggtggtgtgtgcctgtagtcgcagctacttgggaggctgagacaggagaatcgcttgaacccaggaggcagaggtagcagtgagccgagatcgcaccactgcactccagcctggcaacagagtgagattctgtctcaaaaataaataaataaataaataaataaataaataaataaataagctgtttcgcagaaacagaaaacgaaatgccgcatgttctcacttctaagtgggagctgaacgttgggtactcatggacatcaagacgggaacgtcgtctcatctccagcagcttccagcccagcactggggattctaaaagggaagaggaagggaggggccaaaggctgaaaagctacctattgcgtgttatgttctctgcctgggcagtgggatcagcagaaggtcaaacctcagtgttacacaatgcaatgaacctgcatgcgcacgcccagaatctaaaataaaaataaaataaataaatagaaaaaataaaggcattaaaaataatttttcagctatatatatatatatatatttcatcgtgtttgtgatttggcaagaaaaatcaagagaggtctatttttcagatttgaaagttagtttttctttattcagattccgttttataaatgagtaatttgtgatgtgatgggcagcctttaacattttaactgacaatcagtagatggatttatcatcatgtttatggctgtgctggtgtctgtaaaaatagtatacagataattttttttttgagacagagtctcactctgtcacccaggctggagtgcggtggcacaatctaggctcactgcaacttccacctcccgggttcaagcgattctcctgcctcagcttctcaggtagctaggattacaggtgcactccaccatgcccagctaattatttttttgtatttttagtagaaacggggtttcaccgtgttagccaggatggtcggcttccggtgttgtttcagcatatggctaaattaaaggcttagattctcagtttgctcattctaatttagctgaattctgagtattatgcatttgtatctgaggttccaggcctctccctcctccttctcggggtattaaaactcatgttgccaggtgcatgactgtagtcccagctactcaacaggctgaagcaggaggatggctggggccaggagtttgagaccagcctaggcaacatattgagaccccatctcaaaacaacaacaaccaacaaaataaaaattaaaaaaacacctcatgtgaagagagatctctctgctacccttgaagatcagaataacataagttcaaagtttctctggtatccagtgaaatctgctccttcggtttttttgcattgaccaaattgctaatggtgaggaagtaacgagaccaatggaagatgttatttggcacattaattattggggacccataagctgttagaggtgaaagagacttcagcaatcattccatagaaatgaagctccaggcggggctgtgacctctccccgctcacacggcctgtgagggtggacgctgagcccaggaaatgtaggtctcctgtgcctcagtccttcaggggccaatttaaatgagaagggaagttggatggtagagttcatggaatagcagttcctctgtcaggcctgtgtttctctttgctgccactaacatataagaaagaaacatgtttctgagatgccacagttatcacttaaaggcacttttcattgtattgctgtcggtctgtgctcactgctgacagcaatggcaggctgccatccttggagtgaggacctgtgcttctacttcctgcttcctctgaaccccagcagctgccagcacagcgtctaggagtagtggctgtggacataattaggagtttcttgagcagcctagttaacagccccacagagggcatgatcatataagaacgtcactcatgtcattatcatttaattctatccgaaaagagttaaaatcaacattctggagttaagtgaacagcttgttaaatgaataacatagacataaaatccagtgggtccaacaagcagtgattactatagttaataataataatatcatcttgatgaacaagaacaggaaagagaatacagataagactatcgccatattcacgtcttttgggatcttgctatgtgctctgcatcatgcagtgggctttccttctcaccagcactgtgcaagtaggatattattattattccctttataacataatccacgtgttttacaagtggaaaagaaagacaagacaaacctgctggtaaatattttgaacccaattctccatttccccactagatggcacttttatacctctctttgttccattttaaactcacagcagatgggcagagcgcacttaatttatggtaagtttaaacaaatcctatgtatatataatatctgggaactttaaatcaaataaacggcttccattcaaatatgctttccttttcaaatataacacttgtaaatatctggtccccggacagcaggttcgcctgtccaccagatgctccaggacggcgctgggcccttgctcctgcgctgaccgcccagcccgagccccggggccaggtccacggtgcccacgcgcgctgtgttctgctggggtccggcttagggctgcttcggccctcggcggcttcctctgcgctgttgctgccctccccacacccctacccctgctcactcagctccttcacctcttccctgatgaactggggaacagtatccccaaccttgatcccgcaatgtattgttaaggctgtgttgtatttttaaaacaaacaaacataaacatttgaatgctgaaggcttagtgataataaaaatagtctacccacccccccacatcacatcacaacacacacacgacacatgcacatataaaacacacattcacacacgaaacacacataaaacacattcacacacatgaaacacacaaaacacacacaaaaaacatgcacacaacacataaaatacacacaaaacacacatgaaacaagcacacagcacacaaaatacacacatgaaacgcacatacatatgaaacacgcaaacacacacatgaactacacacataaaacacacagagatacatgaaacacgcacgcaacgcacaaaatacataaaacacagatgcacacacacatacacatggaacacgcacacaaaacacacacatgaaatacacacagaacacacacatgaaagacacaggaaacacacacacacacacggaaggcacacacacatcgggaagcggcgatggtcacgctcactccaagaccccagctccccgcggaggcctcccgggccggtgttcgctgccagccaaacctaagcccgctcctcgcggggcccgcggggcacccccaggttctgtgcagctgaagcttgtaccattttgtgactgtgacacaggaagcctcctagggacaaacttcggtcagcatttgaatcagccctgactcggtgacagtgtctcataaacgggtcagctggttagggacttggaaagagagcggggaaacgggtgagcagaaagcctggggaacggagcccagcggcgccaagtcgccccggcgtccacctgcgcccaccagagagcgccgggcccccgcgagcggaacctcgaaccgcagcctccggagggctgggcccggcctgaagcttacacgcactcccttctcagtcccacttttgccctgtcttcaccttggagcccccgagtttccaaaagatactggaatccagtctcagcctgagcaccctatagcaaagttaggagtcagccccactaactggaggtaagtggatcatgtgggaggcccaggtgtgcagagcccctgaaaagttacagcgtctccacctgggcgtggagatctgggccaccccagccccgctgggcatcgcaggaatgggcttccagtggctcctcagtgtggccattacaccatcaaacgaaaaccacctcccatggaacatatctatataaaaaacaacaaaacagaccccttcagaaagtgagctcagatgactcccctctgctaagaggtgcctcctgggcaggtatttctgtgggtgccacatacttttggggaaaatgagcccttagcaactcatatttttattcacaaataagccattaaactgtttattgaaggaagagggtatggtctctattagaaaatacagaacaaacatttacaaaaaagtattattttggaatgaatttcagttcaagagctcccttttaaagtcaccctaagcataccggttgctacacaggcaggattcaaaaatgcaaatatcaaaaatactcaaaactctcagaaacaaaccagtgaaattcattgtcctactcattatccaatttatccaacagtaatcattacgattgatttccaggcctgtaactgcctattttcatggcctgtagagaggggagtatagggtgcaggcaggagtgtctgaaggcatggaagtctctgcctgggcattaacaaaatgagtggaaaaagcagacaattgcatctgcgggcattgatatctcttatctgcacgttagacttagttttatgagtaactaaattgagttgagactcttaactgatgttcagattcactgccagcactccccacacataccaggaaacaccctgtgttccagtgggcagacccatgcaagcccacccccaaagcctgggggtgcagagaggccgaggaaagaggctgacaaatccagactctcagaaaggagcgttgaatagggacttatcccacagctgccctccagaaagcttgcttgctttttctttctttcttttctttctttctttctttctttctttctttctttctttctttctttctttctttctttctttctttctttctttctttctttctttcatctttctttctttctttcttcctatctttcttttctttcttttttgatatggagtctcgctctgtcaccaggctagactgcagtgacgcgatctcagctcactgcaacctccgcctcccgggttcaagtgatttgcaccagcctcccgagtagctgaggctataggcgcccaccaccacacccaggtaattcttgtatttttagtagagacggggtttcaccatgttgaccaggatggtctcaatcttttgacctcgtgatccacctacctcggcctcccaaagtgctaggactacaggcatgagccaccgcacctggcccagaaaacgttctttctatagcaagcttttataagactgatgcaccagaccctcttgcaaaactgctgaccagtggggaggttgaataagcatctttataggggtcatctatgccccaggcactgtttgtttataggggtcgtctatgccccaggcattgtttgtttgaaggggttgtctatgtcacaggcattgtttctgaggaactaattggtgagcaggggtccgacagtcacttcaagatggccttactcttgccgtgcactgatctcgccactcagaaaatgctcaaaggccactttttggtgcacacaggaaaggtctcttctattcagctgaatcaaaacatttgaaattggctgtgtttgttttcagatctgttcaggtcaatttaacaattattgtaaagaagtaacttacttataattacataagccccaacctgaaagaattcccaataaccaaaactggaataacttgagtgacagaatgaataatctagcattggattacatcttaaagtaaaaaataaatatccatgagttcatactgatacaaaatgattgaatgaacaaaataatgagagagaagagagaaatccgctgtacaggattccgggtaagttacaccatttctcctctctcaaggatgtggagcttaaccctctatcccttgcttagggagtagagcatggataggagtgaaaaggtaatttacagaggagaaacaggctagttgatgaggtaacatcatcagtggtaagtcatcttgatagtgtgcactgtttaacaagcagatttattgatacataattcatatatacccaaacttccatttaaaatgacgattcggtgatttttagtatattctcagagtagtgtgatcattaatctaattttctatcatcttcatcactcccccaaagaaacctcatacctatgtgtagatttgcctcttctgaacattttacataaatgcaatcatacaacatggggtgttttgtgacctgtttctttcactttcaccttgttttcaaggaggaaccatgttctaaagcctgtacttcattcctttttattgccatataataaaaaggaattgcccttgtataattatacacattttatttacccattcatcgatggaaatgtgggttttctcactttttggccatcatgaataatgctgctataaatattcatgtatgagtttttgtgtagacacgtttatctttctgttgagtgtgtagtacccaggagcagaatttctgggtcatatgggaacactatgtttcatattttgaagaatgatgtttttgaaagcagctacaccattttacattcccaccagcaatgtctgaagcctccaatgtcaccacatcctggctaacatcgatgattccgtctttttgattctaagcccaccttagtgggtgtgaagtggtatcttattgtggttttgatttgcatttccccaaggattaatgatgttgagaacatctttatgtgtttatcagccattagtacatcttctttggagaaatatttatttacttattttctccatttttaattggggtattttctttttattacaaagttgtgagttctttacatattctggatactagtccttgttagatacatgatttgcaaatattttatgccatactatgggttatcttttcactttcttgatggtattttgtgaaatacagaagtatttatttttgatgatgtccagtatatcttattttttcttttgttgattataatcttgaagttgtgtctaaggaaccactgcctaatccaagggcacaaagatttagtcctgtgatttcatctaggagttttatagatttagcagttacatctagctgcatgacccactttgagttaatttttgtgagtgatgtgatacatgggagtccaaatccatcttttccatgtgaattccagttgtcccagcactggaacccttgtcaaaactcaattgaccataaatatgagggtttgtatctggactgtcaatgttatttcattgctctatatgcctgtcatcatgccagctccacacaatgttgactgctggagatttgcactaaagtttgaaactgggcaacatgagtcctccaaatgaattattctttttttaaatattattttggctattttgagtcccttgcatttctacatgaatttttggatcagctaggctacttctgcaataaaagacagctgagattttgataaagatccatttgtggagagtagccatcttaaaaatattaagtctcctgatccatgaatgtagaatatctttccatttatttagatttttaatttgtttcatatctttagcatataaattttgtacttcttttgttaaatgcatgcctagacattttatttttatgctattaaaatgcattttgtccttaactttcattttcgtattatttattgatagtgtatataaataaaattatttttgtatattgaccttgtatgctgcctcatgctgaagtggtttgttagctgtagtggtttttctgtggattccttaggatttgtttatatatatgatcatgtcatctgaaaatggagatcgttttaactgttccctttttctttttcttttataatagccctggctataacatctagtgtgatgttgaatagaagtggctagagtaggcattattgtctcgttcttgatattagggagaaagcattagtttcactccagtaaatatgatgttagttgtggatttttcgtagatgcttctaaccaagacgtgaaagtttcctcctatgtccagtttgctaaaattttaatcaagttgaggaagtttcctcgtatgtatagtttgttaagcatttttatcatgaaaaggttttagattttgtagattactttcttccatctattgagatgatggccatgatttgtgctgtattctgtgaataggatgcattacactgataagctcttggatgttaaaccgaccttccatcaccgtaatacattccacttggtcacagtgtctgatcttttaatatgtgatgcaattaaggttgctaataatttgtcaaggatttttttaggctataagggttatcactgtgtgattttttttcttgctatgtctttggttttagtgttagggtgacactagctttacagcatgagtggggaagtgtgctcttctgttgtatgttttggaagagtttctgaagaatcagtattcattctttgaatgttttgtagaattcacagtgaacccctctgggcctgggattttctctgttgaagtcttaaaattcacaattcaagcatatccatttcttcttcagtcagtgtcagtagtttgggtttttctgggaatgtgtccatttcatctgagtaatttgtggcatgcacaattcatagtattccactataatgttttataattgttcatagtattccattataatcttttttatttccataaggtcaatgctgatgtcctctcttccattctggattttattaatttgattgttctctctctctttttcctggtaagtgtcactaaaggtttgtcgattttattaatcttttcaaagaattcacatgtttttattgatttttctatttactctttcctttatggctactgtaatctcgtttcccttttaatgaacttttttgactatgcaacgaccagttccggtgggtatatgacaggggagccctgtcacagcgctacccaggacccagttccggtgggtatgacaggggaggcctgccacagtgttgtccagggctttgcagatggtttggaatttccctatcagtgcacttgaacacctttatggaggtctgtcctgtggcataattcagattccagagccacagtagaagaggtttcaccagatttgtattcacgttgctgaatctcagtccacccatctctagctggaaatagactacaaagtccctttgtgatactaacagtgtataggcacttacacttttgaaattaggcaatgtgagttctccaacttaattctctttttccatataattttggctattcttattcttattttacagaggagaagactgaggcacatagaggttaaaaattagaggagaagcgagtaagaagtaggctagaaaatcaaatccatagcatctgctcctgaatctacacctttccccaccacctgaggaatcagctaataatggcttccgaactaaatctggcctgctgtctttgtaaataaagttttattggaacacagccataaccattcattgacacatcacatatggtgcttttgctctataacaacagagttgagtaatcgaaggggcgatcctgtggttcacaaagcctaaaatatttactacctggtgctttcccagaaaagtgtgctgatcccagcactgcgctgtactgactgccattataatcatacatgcctcaaggccattttgaaaacaaataatgcaactgattatgcctagaagagtgtctagcacacacatagacacatgtacacatagacacatacacatgtatacacacacttgtgtgtatatataatatatattaatattatatatataatatatatatgtgtgtgtgggtgtgtgtgtatcaaggtcctttttctgacagtctgcctatcagtaattaattgtatcctaaattatttctctattttggttttagagattaggtcatacccgctagtctgctttcctttctcattttgggtctcatttgagccccattcagctgttctccatcactaacatacaagaaatgtctgccgaggttgtgaaggatgaggtcatgattcacactcgaaggagaagaaaggaaaggctgatttccggagtgagactctggtttttggcagagccagtgacctgagcagaatgaaatgacactgtgaattttcattccaacaaagaagaaagaaatccaattgaaaactagctttgactagattttgctgcaaaatagaagatgatattgagctaaataattcaaattcttattcagaacatagagaatgggggggcattcactctctaccgtcaagagcctgctaaggcgatttcagctgctccacgctccccttgcttccagcctcccacgtggccaggctggaaaactgccaccacctccacatcctacccagatctcacctgctagagcacgggcggcagggatccgctccccagcacatcagttttggtccatcagaaacagaacattagagaagactctcaatattgctcatgttagaataaagccagcttcttttctattaaaaaaatgcttgtccaactcgcgtgaggtttgtcagcgacgcagaggaggggcttttgttgttgcaggggtcatacttttccatttgtttttcctcgtggaattttctccagctctcccatttaacactgcgtgccccgccccagcctggccccatgcaatgctttggtgctccagggttgccggtggtcctgcagggtctgcagtcacacaggtctctctcctggaggcagagtccctgtgggtctcagccatgttcttggtcaaatgcagaagtgaaaacaaagcatttcaatatttattgaattaccctatttgctagcctgcattttcattttcaatttatttttacacatatttgatacctatcatgggttgggtacagagctaggttccaagaggaaaacagtaaggaaaaagcattcctgttcctgataagtagtaatctctattaagaaagttcaatgaggacagaaagaaatatcacaaataattgtagtgcaagcagaatcatgtcgttcccaactctgcccacggaagggtcgctgggcttctcaagggcctctggccaggatgtgggatgttactggaatagacgtgcaccattctttgattcattcattcactcactccccacttcacttgcttcttatgccccgcccagccaagttaaatctccttctgtctctcaaaagtgtcaaactgcttcaatctctggggcacagcatttgtcattgcttctgcctgccccttaataaccatatccacctgcttgtgtcttttaactgagttatcagtcacctcctccatgaagctgttgcaagctttctcaggatgacgcccctcttgctgcattgttgcctggtctgtgcctctgtgtagaacttgccacattgcattatggccagaggcttgtgtgtgtccccactaaccctgagctcattgttctacctactccctgcacttaacacagtgtttggctccctataaatgctgaataaaggttgctgattattgcatacaagaatgtattcaaaaatctgcagcatcagatattaatgcaaccaaaacaataagatcttggctattttgcagagtccatagctctgagagccagggggaaaacaacatacattgaattcctgtgtattctatttgttttatgtattgaggcaggtgtttacatgttccagagaatagtgggggtataaaattagacataccctcagccagcctgtaggaagctaactatcagctaggcgattccgtaagatgaaaccacctcttgggcaaatgtatatggcctttgatttagaggcttctagaaattcatttggcactccatagactagacattagcaccaactctcaacattttatcttatctcagacaatattgctttaattactgctagagcggcattgtccagtagaactttctgcagttatggaaatattatttaattgtgctgtccagcgtcactagcctcatgtggcagttgaacacttgtaaagcgactactgcaaccaaggaactgaatttgctttaatgaaatttaaatttaaatggcctcccgtgtctagcggctatcgaatgaatggcctcccgtgtctagcggctatcgtgttgcacggcacagctctagaggcttgggcatattataccatcctatctatgtacactaaacttcgtgactgtggatgcttgtgatgtaataagctgggccctgcaagttaaaattatttttgacatggaggtagcgtgtgatgaagtgcattgatggtagctagggctgcattcaaacttgtagaggcactgaaaccctcatggtgctcctttggccactccctgcctctatgctgtatggaattaaatagattttttaaattttacacacatacacacacacccccccacacacacacgtttaacaacagcctacaaagaataacaaaatccaataaagttttagtttttcctgtgttttagctttttcctcttcaatgcatttttaaattatcaaatataaaattctttaagaggcgaagtgttccagctttgctagtgctcaaatcacctgtgcctgccaggctagactggcactctggcactgatactgctcaaggctgagcagagagctgtggagtgaggttcaccagaccgggaaagacttcatctcaaaatgcctctggggccaggggtggcgcgaggaaagaggttatagaaagccaaggttctgattaaaatggaagtggtttctagagaggctaatacaaacatccatttgtcatctctcaaacccacaaaactccaaggaaccatagctgttctctcaagtggatttcttgtttgccaaaactgtttttggacaaactttacatggaagcctgccatagaaatgagaggaaggcaggctgctggggagggctggaaggaagattcagcttcatgcatttacctggaaacagaggccctctgaggagcccctgagcacttaggaaataaatttaaaaccagtgaaattcactacttgtaggaaaacaaattcagaaagttccctgagtcagctatggcagggcttggctaagaatgaggtacttgtggcttcagtgttaagtggacctcctgctgcagccaagccttcagtactgcagtgttccagccctgagactggcctggacagtgtctagccggggcctgaggagcccaccccgataggtcagtgtgcaatgctgggggcaaagaaaaaagagctcagtggcagtcacagcccaacataaagcacagcttcaattcttcgtgaaatgtgacagggatgagggcaccttgctccaacaaagtcagcctattgagggtagggaagagagggagggttcagagaaagaggggagatgagaggagaaagaaacacttcattacataatttaactatgttctgtgcaaatatccaaaatatgagttaaaatatttaaatctgttgtagccaaatctgagttattcgtcattgctatagaagatcatttgcacaaagcttatgtttcatggattccagtttaaggttagtccaatcctgtccccgacctcatcccagcccactgtatcagttatagtaaaaatcattttaaactttatccccaggtcaggttccccagacacactgtaagatggagacttgcatgcaggagatttggggacatgcagtggggaccaatgcctgcaaagacgttgtgctgcaagagagggacttggggacagagccccagccaaccccaaagggtgctctggaactggagggatccaagcgagttgtcccaaactaaaacaggaggtctaccctattgcccactcctggcaagggaaggaggcgtgaccttggcttgatcctatctgctgaggaccattcctgaagagaaacccagctagaagccattgtcagtcactacagcaggagagattctggcctcagttctgagggggatctgggcagtgccacacagtatccaccatttttggcttcacgtgcccctgtgggtatctgactctggccacagaaccagctgctcacaatggaagaaatgttgagatacttggttccacacgctctcctaacagaaacccaggctcagaacaatgaagcgagttgtccttgggcgtgccaatggttgtcagacgttcttttccatcggaatcacctggagggtttgttactactgggctccatccctggagtttctgactgggtagatttgggatggagaattggtgtctccaacaatttcccaggcgcctctgctgctgctggttcaggagccacactctgagaagcacggggaagcaggtgaatgttgggaagacattctgcaagacaggagtggcagaggcgacattctcatggtggagaaaaggaacaaagcacccgagacagtcctggaactgcttcctgccagtccacttgctgtagaatcagccgctgtgggaggagtgaaggcatggggccaggagcttgacgttctgaattggaatcttccctctaccatttactgactgggtcatcttgggcaacttactgacccattccgtgacgcagttcccataagacggggatggtgatgacaatagttacctaagtcactgtgagggttaaacgagtcgtagaaagtacattttgaggagtgcttggcatattttaggtgtacaaagtatcctattagagataaatcagctgctcttttcgttcttctgatggattgctaatgaacaaatatccatgaaggaagaaaaccagttgtagctttttgtggttcaggagaagggctgccatgtctctttggacaaaatttgtatctactctaaggcatacaaaacagtgccaagagaatacattttaaaatgagctttaaaaaaaaaaaaaacttaggccaggcgcggtggctcatgcttgtaatcccagcactttgggaggctgtggagggcggatcgcctgaggtcgggagttcgagaccaggctggcgaacatggtgaaaccccgtctctactaaaaatacaaaaagtagccacgtgtggtggtaggcacctgtaatcctagctactctggagactgaggcaggagaatcccttgaacccaggaggcagaggttgtagtgagctgagattgcgcgcctgcactccagcctgggcgacaacagcgaaactccatctcaaaaaaaaaaaaaaaaatttagccattttaataggtctacagtggtatctcattctttttaaatgtgtatttccataagaacatatgatgttgagcatctttcttatgctcatttgctggtgaagtgtctgttcagacctttgcccatttttttaatggggttgtttgtcctcttattatttagttttatacattctttatatatattggattcaagccctttatcagatatgtgttctgcaaaattttcttccagtctttggcttgtcttttcatcctccagcagtgtctttttgtttccaattctaatttgattttattttttaacttctattttagtttcaggggtacaggtgcaggtttgttatacaggtaaattgcatgttgcagggcttgggtgtacagattatttaatcacccaggtaataagcatggtgtgccgtaggtagatttttgatcctccccctcctcccgccccccagtctcaagtagaccctggtgtctaatgttcccttctttgtgtccctgtgtactcaatgtttagctcccacttataagtgagaacatgcagtatttggttttctgttcctgcgttagtttgcttaggataactgcctccagcttcatccatgttgctgcaaaggacacgattttattctttttatggttgaatactattccatggtgtatatgtgccatattttcttatccagtctaccatggatgggcatctaggttgatgccatgtctttgctattgtgaatagtgctgcaatgaacacatgcatgcatgtgtctttatggtagaatgattgtgtattcctttgggtatatactcaggaatgggatcgctgagtcgaatggtagttctgttttaagttttttgagaaattgctaaacttctttccacagtggctgaactaatttacattcccaccagctgtatataagcgttccattttctctgcaacctcaccagcatctcttaacagtgtcttgtgcaaagtaggagtttttaattttaatgcagtctaacttacttttttttgtttcatgaattgtatttttgatgttgtatccaaaaattcatcaccaaaatcaaggtcatataaattattgtatgttttcttctggaagttttacaggtttgcattttaaaattaggcctatgattcactttgagttaatctttgtgaaagacataaattctatgtctaggttcaaagccatgacccagttattaccctgtgaggacaggtttggctggcatggctctgaggagccagaagacagcatgaggacctgtggcaagaaggaaagaagaaggaaaggacaccggaaactgtagctggaaaagacacaaggcaaactttgtaattggtctcaggctagttctgtaagagtggaaacacattcactaatttttaataatgtaaaatttggaccattgaaagattcaaataatggctgtaggtggtcaaaaaggaggattctgacacttttgttagtgaaacattatccgtatcttagttgttgcatcaaaggacacattgaattgggctgtggcaactgcagcctccctgtgtgcccaacccccactccacatgcgtggtcggctccagaggtgggattgttccaccgtggaaggtgctcacatgtggggagcccagcacctctcttggcctgcctttgtgttctcctaactctatcagtaatagaataaataaagtagaactttaaccttcagactgctaaaacaaatgtcttctgtgttgccgtttctttaaatgtgaataaaagcctccttccttccttccttctctccttccttccttctctccttccttccttcctcctcctcctcctctttctcctcctcctcctccttcttcttcctcttctccttcttccccttcttcttcttcctcttctccttcctcttcttcttcttccttcttcttttcaattttatatggcactaagacaatatcccaggaccaccctattcgtaaactgccatcacccaaacttgtcataggattgctttagatctggattgtgatgatgtaatagcaatgtttatcatgcttttattgtgagcctggtgctatactaatttatataaagatgatctcgtttaaaattcccaataacatgcaagagctgatggtattttccctgttttatgaatgaagaagccgagactctgacgggttaggtggcttgtctgtggacactccctcaataaggagcagggctggctggcaggcttgctctgaccccatcagcaatactctccactcccctgccacggtgcctgctgccggagggatctccaatcactcagctgaattttaattttatcttatggatgaagagtcacgtttgagagtatactgaatggaatttttccacgtaccgttggtactatgaattgtaactacgtaagattgaattgagagctggcaggggagctttgcttggcaaaaatcagaagtggggaaattaaggctgggctggagctaatgtacagtagcggagacttctaaggctcattcatatttcagcctcctctccatctgggcttctcccaccccccgattctgctgcaattaggcagagccatgctactatttctgatgaatgaattgtggtgaaaaataatgtagcttaaatatagcttaataggcaggaacatgtatttacttgttggtataaaatgtgtagaaataggccaggtacggtagcttatgccgtaatcccagcactttgggaggccgacacgggcggatcagcagaggtcgcgagttcaagaccatcctgaccaacgtggagaaaccccatctctactaaaaatacataattagccgggcatggtggcgtgcgcctgtaatcccagctactcgggaggctgaagcaggagaatcacttggacccagaaggcggaggttgcggtgacctgagatgacaccattgcactccagcctgggcaacaagagtgaaactccatctaaaaaaaataaaaaggtcaagaaatgttgcctcctgttgtgacgatcacttggattcatggggagaaatctcacttgggattacccgggggtcagtcaactacaaagttgcccagacacacagaggactttgcacaagtgagaagtcaactcgttgggttttaaccacagacttgagcgttggtggttcacatggcatcgcctggccttcccggcaaatgggctctccgttagcccgttacctccagtttaggtgataggcacactgacatgctccctccccgccatgctcacaatttatcttctataattttgaaataattcagacttctttggaaaagcttctgtcatttacttcagtctggaggttgaggatcctccgtagagtaggcgccagccacaattttaaaaggtgttcctatgatctcttatttcctgcagacggaaggagtcgggtttctgtgctgtgcctactgcagggaaggggctggaaatggattctctcatcggagttattgaggacctggaccgaggctcaggtgtttctgggcactttagaaatgattcttacttttcttccgtattgaaaatcaaaaaaaaggaagatgttatttcagctcatacactgtaacaaaattggtgatatttagctttcctatttaccccattttttgaggcagcagaaattcaagctataacaccatcaacacctgtgaagggatttattggtagagatggagtttcttatccactgaatccttgtgttgagtggagtgggctcacattcaacagctactatagcagtcatagaggtcacatttcactaaatcataagtattctagtaaaacaaatgcaaggctgggtgcagtggctcacgcctgtaatcccagtatttcagcaggctgaagcaggagcatcgctggagcccagttaaagaccagcctgagcaacatagtgagaccttgtctctacaaaagcaaaaaattagctgggtgtggtggcactcacctgtagtctcagctactcaggaagctgaggcaagagagctgcttgagcccaggaggtcaaggctacagagagttatcatcatcgcaccactgcactccagcttgggcaacagagcaagatgctgtttcaaaaataaatagatgcatatatttgcatatgtacatgcatctaagttatagatgcatctattttatatatatgaatctattaatatagatgcacctattatatataaaaatagatgcatctattatatatatataatatatatgcatctattatacatatataatatatgcatctaattatatattatatattatataaattatataaaatatattaaaatatatattataaattatataaatatatattattatatataatagatgcatatatattttctatatatatatgcaaatatatattttggagctatttgggtaaaagtaaaattatagaattgattctcaatgaaataccatttatttaataaaatggtagaattagtcacttttctgtattacatcattatttttacattttgaagcattttactttcagcaattatttgcacagttggaatctttagaggaaacgcagagaatttgggatgccatgctggcctgaaatttcaatcccaagagcactgactgccagataatcagtgtgaatgagaaggaagacttcgactcaaatctaggactagattaaaattatagatagatagatagatagatagatagatagatagatagaattagcttagtttatatgcataatatgtatatataattatacattaaatgtggttattacatattagaataaagttaaattgtacacttgtgcatatacacacgtacacatatatatacacatatgtgccataacaagcattttgaatatataggtaggtgaaaagaaagaaatgagtaagagaaggagggagagagggaaggaaggaaaattagattgtactagaatgaaatacatgaaaatattaacaatgattattgatgaatggtgaaattatatggactattttaaaaaaataccacatgatattttatttaataacaatacattgttctaataatcactaaagtaaaacaacaatgaatgcaaattaaaagaagcaatatgaatggtactaagttcatacctaagcatactttaaagaaaaagttattttattttttaaaataagctttattatttcattgagaaatgcctctcatttgcaaaagtgtactctgaacttctgatttgcagtccagcacataaagagcttgacatcatccctcacatcctaacaacaggaacaaagctgaatgaactggacaccagcaacttttcttggatccgtcagagaattgaggtcactggacatgccaccgccttaaaattggagaggcagacagacaaacccagagaattatagcttaattcaaacacagcccaggagcagcaatcgccactggagccagtactggggtaggaaaacttagactgcaattgacaaatttctgaaggctcttgtagataagcttgagcattaaaaatgccagaagggggcctggtctggggtgggggcacacttttgtgagttttacctccagaagccctgcggttctcatggtgagaaaagagaaaaatcccctcttgcttcccaaagggagccgttttgagatatgcccagagcattttgtgctccttaacaagacccatcttctaaatttacaaggaaaggcaaaagatccagatgactagacacaatattaaaggaaaagaaccaagttgaagagttgacattacctaacttcaagacttatcgtaaagctatagtaatcaagacaatgtggtattggtgaaagaatagaaaaatcgaccagcggaacagagtagacagcccacacccgcacagatcccatcaagcaatctttgaaatagacaaatcgagcagcggaacggagtagacagcccacacccgcacagatcccatcaagcaatctttgaaaagggcgcaaagacgtttcagtggagaatggatagtcttttcaggaaatggctctggaatatctgcatgcgtaagaaatgaattagacagagtttacatatttcttacatatttcacaaataattaactgaagatgaatcaaaagtctaaatgtaaaatgtaaaactatgaaactcctagaagataataggagaaaatccaggtggcctcgggtatgacgatgactgttcagatacaacaccaaaagtatggtccatgaaagaaaaaaattatgtcagacttcattaaaatcaaaaacttctgctctgcaaaaaactctgttaagagaatgaacagacatgccacagacatgcaaaaacacacacttgataaaggatttgaatccaaaatacactaagaactctattttttttttttttttgagacagagtctccctctgtcgcccaggctggagtgcggtggtgcgatctcagctcactacaacctccacctccccagttcaagtgattctcctgcctcagcctcctgagtagctgggactacaggcatgtgccaccatgctgggctaatttttttgtatttttagtagagacgggatttcactgtgttagccaggatggtctcgatcccctgacctcgtgatcctcccgccttggcctcccaaagtgctgggattacaaacaaagaacttttaaaactcaacaataagaaaacaaacaacccaattacaaaatgagccaaagatctgaacagatacctcatccaagatatacaggtagcaaataagcatatggaaagatgctcaacatcatgttattagagaaatgcaaactaaagcaacaataagacaccactacatacctattagaatggctaaaatccaaaatgctgacaccaccaaatgctagagaggatgtgaagcaacaggagctctcattcattgttttgtccttacaaaactaaataaactcttactatataacatggaaaatgcatgtcttggtatttatccgaaagggctgaaaaactatgcacacataaaagcctgaatgtagattgtatatgctttactcataattgccaaaactagaaagcacctaagatgttatccaataggagaataaataaacaaactgtaggacaaggttgtaatggaatattatttagcaataaaaagaaacaagctatcaagccattaaaagacatgggggaatcttaaaggcatattgctaagagaaagaagccaatctaagcccggcactcacacctgtaatcccagcactttcggaggcagaggtgggcggatcacaaggtcaggagatagagaccatcctggctaacatggtgaaaccccgtctctactaaaaatacaaaaattagctgggcatggtggcatgcacctgtaatcccaggtacccaggaggctgaggcaggggaaacacttgaacctgggaggcagagattgcagtgagtcgagatcgcaccattgcactccagcctgggtgacagagtgagactctgtctcaaaaaaaaaaaaaaaaaaaaaaaagaaaaagaaaaaaaaagagaaagaagccaatctgaaaaggctgcatgctgcgtcaatccaactatgacattctggaaaaaccaaaagtatggaaatagtaaaaaaaaaatcagtggccaggcgcggtggctcatgcctgtaatcccagcactttgggaggctgaggcaggcagatcacctgaggtcgggagttcgagactagcctgaccaacacggagaaaccctgtctctactaaaaatacaaaaaaatcagctggatgtggtgatgcatgcctgtaatcacagctactcgggaggctgaggcaggagaatcgcttgaactcaggaggcagaggttgtggtgagctgagatcgtgctattgcactccagcctgggcaacaagagtgaaactccgtctaaaaaaaaaaaaatcagtgattgtctaggatttgtgaggtggaaggaaaggatggatgggtggaacacgaggtttttagggctgtgaaattattcagcatgatgctataatgacggttgtatgtcattatacatttgtcaaaacccataacatctacatgtaaccaagagttagccctaatgtaaactacagattttagctaagaatcatgtaacaatatgttcatcagttttaacaaatgtcctccgctaatgcaagatgttaggagaacctggaagggtaggagaagaatacataagaaccctctgtattttatgcttaatttttctgcaaatctaaaactgctctataaaataaagtctactaatttttaaaagtgtacaccgatttggaaataagtcctactacacaaaacgtgatgggtaagcctgaactccgggtccagactgcttgagtgagctgggacaaatgacgtgtggaaaatagcaggaacagtgcctggccatagggctggtttgaaagggcagatgaaaatctatggggagcagatggccaagtgcctccagatggttataacattagatagagttctcataagataatttctactagtaagaaccactcacaatgggactcggctctcttctgaaatagtttcatgtcgctcaagtatccaagcacagactgatggatgaattcagtattcagtattggttttgaaaagaaacacggcattataaggatgatcaaatagtacgttctgtaatgtgctggaattttgggatcgtctgaaagaaggtgacatgtaaaaccacttaggagattgtaaaagccaaacattcaagacgttgtttgtgaggatcgtcttttttttttactgcacatttcagctcattgtcaaacaaatttctacagagccttggaattatatagtatcagcattggagaaaacatcagtgctcataaaatcagccgcactttacagatgtggagtaagaggtgctcaaagattgagtttccctggtcacaaagctaatcagtgataaagttgagttcaagctgtggctctaaacctcacttcaggactcattttattatatatgctgccactgttattattagtcacagtaacggtttcaaaatcctaaagaccccacatttgcattgaaaccaagataatttggtttttctttccggagtccctcctcaatgctccacggtcatcagtcagcgcctttttgggagaaaatgtttccagctgccactctttgtagaagttgctcccatttgctgttctatgtctacaacgctgcatatcaaaattttacaacacgtgggcgatgacatttacttactaacataatagcaccttcacactaaacaattttcaaatcactattatattacctctttgtaataggcttataaagttgacaggacagaattttattttaatcttcatgttatagatggcaaactggggttcagagaagttgcatgactcacctacattcacagagccaatccgtgtgtgaagtgggttttgacacaagtctcctggcttctttatctggtgcggcctcatttgctgttgctatttggaaataaggtgttacagaagctacttaatatgcttgattcaaagtcatttgtttggctaaagaaataatgtcttaataataattctttaaaagtattttataatatttgatataggcaaaagaacataagtaagctatatgttacctattatgaagcacaataataaaataaacacctgtgaactcatcctctcaaaataccttgaagctacctgtgtgtcttcttcatattattactttgtctttcccccagaggtaatgcttatcattatctcttttaaaaatgtttattttttaaaagctagcccaacattatctgtatctctaacattatgttgtttagctttgtttgtttttaagttacactaaatatttttccaggctgtatgctgtcttcagcaaattgctcttttcattcaatatttgatttttaagatattttattttctgtaacagtttatccatgttctgctaaatcatattccatcatgtgaaatagcacaaaatatttatgcatttgttttgcatcagtggacatttgggttgttgagaacttttttctgttgtgaacaacgataaatggaattttcatgtttgtctcctgtgcacccatgtaagtatttacaactgggtatgaaattggtgggttaaggacgagacaagtattcaaactcatgaaatgctgccatactggtttccaaagctgttgtgacaatttgagttatcagatcttagttttttccagtctactgttgataaaataatacgtcattgagatctcaggacgtatttcctgagaagctaatgagggtaaattactttttgtggttatttgtaatttgggctttcttctctgaaataattcttcatgtcttttgcccattgttttttgttttctttgctaggtagggattttttggtcaaatgtagtgtatgtatgtatcctctcccagtttatggctttccttttcatctcctttctattttcttttcctttttttttttttttttttgagatagagtcttgctctcgtcaccaggctggagcgcagtggcgcgatcttggctcactgcaacctccgcctcccaggttcaagcgattctcctgcctcagcctcccgagtaactgggactacaggcgcccaccaccacgcccagctaatttttgtatctttagtagagacgtggttttgccatgttgcccaggctggtctggaactcctgacctcaggtgatccactaatctcggcctcccaaagtgctgggattacaggcgtgagccactgcacccggcctaaagcattttcatgtactcaaatatttcatatagtgaacagtcttttatggttaatacttttaggtcatatgaaaaatccttcttcactattaagtttataaaattgtttttctaaaacatgtaaagagggttttgttttccatttaagtctttaacccatcaggaatttactttagtgtatggtaatagtagggatccagcttttcctcacatggatgaccaactgtccccacctgatcttttggaaacctgatcttttcctcagttacaggcaatgtcaccactgctgtcttatttcagttttctctatctgtgagggtctatttctcgacttgtgatttcgttcctctgttcagtttgtggatcctactgcccgtgccttaactaacattgctttacagcctgtgttgatatccgccaagaactgctctcagagtctcaacagagtcctgtctattatatgtttgttattccatgttaactttagaatcatatttttgtcatgtttgtcaaaagtggcagaagaaagaaaagaatctatgggggtttgactggaattggattgagtctagcctatactattgattgtactgtcgcaaacttggtaatattgattctttccatccatgaacatattacagaatcttttcatttcttttgtctttatcattatctttcagtatagtttttttttttttttttgttctccatagtggtttcaaacatctctcactaattgtatttctggatgtcttgttttttttaatatgttttacttgtaaagccacccgggcctgctgatttctctgtacaaacaattttgactatagattcaatcattttaatggcaaaaatacttgtcttaatagaatgtctaaagacactaagcggttaaaaatacttttctgcagagaggaattgaattttcttctgctgggagccagggagcacgtctgagctagagccacttcagcgcctttgtggggtccccctcccctgcccacggccctgctgcctctggattgctgctggcatatggccctcagagaaaccaagctttcctgtgaataatacctagtgaatgatattttatgtgaataatacctagtgaatgatacttttctgtgaataatacctagtgattgatagatacttttatgtgaataatacctactgaataatagtttatgtgactaatacttagtacttagggccctgattttaattcaagttattacaataaaaatttattttctttattttgtaattgccccttttgatatttctctgatttccggtgagctcagaaatgcacaaaagaaaaaaaaaacatgttgtatggaggacgtagatgtttttcagggaaaggactctttagaatatccagcctgaacttctgccaaaaataaacatctccagactggctcttaggtaggcacttggcattattcacggctcccaattcctaacaacaacaacaaattttgcaatgctgagtgtgatgaagggtagctgagaagcgttccctttcatttagagataatcacagtcttaaaaaagaaagatctttatttaagataggcagtgattaagccaccccttgcaatgccactgccccccaagttttctacacatctaccactcagaatggcacaatggaaatatctcaatgcaacagcaatactatggaatgcttaccacatgtaggcaccatatacagtcacacgattcctatttatgtatatgcttacttgcgttcactggaaggattgccttgcttatcattattgaattccagtgaggcctgcatgcggcaggtgtgcccagcttggactggccaagctgcagtttgtgatcgtgctcccacctttccaagccgtctgctcacccttattgatgtggacttgaatatctgggcatgactctcaagcatgtttccaagggctcctgtcactcaccactcttgaatgtgagaactgtgcctcgtgcatcactatgtcaaccagctagcctggtacatgtttgctgtaccgaactcttcagagggggctgggagtaaaggatacaacttatcccctttctgcgtaagcttggctatttatgatgtttcaaataaaaaataacatggttctatctactaatttgtagcttggtttacattaacacacacatacattcacacacacacactcagagtccatcaaataagtggaaatatccaaagtttatctgggggagtatcactcataggaaatacatagacgcagcctaatgaacacgcaggcttgtgtttgccctgattttatatttcatgcacgtagaatctggattccattctatctggtttgtgaaaaagttttcaccatttactctttttcaaataacaaacatttcttgtgaacttacaaatgtatactatgctgtaatgttcagcaacacaactaaaagaaagggactaggtaccagccctacaggaactctgattctcctatacgaattagataaacaggctgggcacagtgactcacgcctgtaatctcaacactttgggaggccgaagcagggggatcacaaggtcaggagttcgagaccagcctgaccaacatagtgaaaccccgtctctactaaaatacaaaaattagccaggtgtggtggtgggcacctgtaatccgagatacttgggaggctgaggcaagacaattacttgaacgtggcgggtggaggtttcagtgagccaagactgcaccactgcactccagcctgggcaacagggcaagactctgtctccaaaaacaaaaacaaaaacaaaacaaagaattagataaacagttgcaggagggtaaaaagtgctttgaaatatgtacatacaaagaatcaggacagtaaccaagagtgattacttctgcctcagttaggaaagaattaacaggagtaattacagttgagccagataggagttttccaggaggagcacaacatcaacatgtcatacagagggaacagcatgatgtagtgaaattgcaatgagaaaagcatgagtttacattctggactcatcactctccagtttttggttaacaatcactttcctttgagagaatcatttcttctttgcaaattaggcacaattacttatctcagacatagcacaggattgactgagataaattatgaagtgcttagcacagcacagcactcctaaaagtcagtcaagtggtggtagttatactttgcaaagacaaataagtcatatgcaggaggctgaggcaggaggaccagcctgggcaacatagcaagaccctgtctctacaaaaaataaaaaaagtagcctggcattgagaggtgacagcgtgctggcagtcctcacagccctggctcgctcctggcgcctcctctgcctgggctcccactttggcggcacttgaggagcccttcagcccaccgctgcactgtgggagcccctttctgggctggccaaggccggagcccgctccctcagcttgcggggaggtgtggagggagaggcgcgagcgggaaccggggctgcgtgcggcgcttgcgggccagctggagttccgggtgggcgtgggcttggcggccccacactcggagcagccggccggccctgccggccccgggcaatgaggggcttagcatccaggccagtggctgcggagggtgtactgggtcccccagcagtgccggcccaccggcgctgcgcttgatttctcaccgggccttagctgccttcccgccgggcagggctcgggacctgcagcccgccatgcctgagcctcccacccgcttcacgggctcctgtgcggcccgagcctctccgatgagcgccgccccctgctccacggcgcccagtcccatcgaccacccaagggctgaggagtgcgggcgcacggcgcgggactgggtgaagccagctgggctcctgagtctggtggggacgtggagaacgtttatgtctagctcagggattgtaaatacaccaatcggcaccctgtgtctagctcagggtttgtgaatgcaccagtcaacactctgtatctagctactctggtggggccttggagaacctgtgtgtccacactctgtatctaactaatctggtggggacgtggagaacctttgtatctagcgcagggattgtaaacgcaccaatcagcgccgtcaaaacagaccattcagctctaccaatcagcaggatgtgggtggggccggataagagaataaaagcaggctgcggagccagcagtggcaacccgctggggtccccttccacagtgtggaagctttgttctttcattctttgcaataaatcttgctgctgctcactctttgggtccacgctgcttttatgagctgtaacactcaccgcgaaggtctgcagcttctctcctgagccagtgagaccacgaacccaccagaaggaagaaactccgaacacatccgaatatcagaaggaacagactccagacgcgccaccttaagagctttaacactcaccgcgagggtccgcggcttcattcttgaagtcagtgagaccaagaacccaccaattccggacacagcatggtggctcacgcctgtaatcccagcacttcaagaggctgaggaaacactgcctgagcccaggagatcgaggctgccataagctgcgatcgcatcacagctctccagccggggtgagggaacaagaacctgtctcttaaaaaataaaacataaattagtcctgagcaagaaataaaatgttggttgaaaatttttaaagtattttccaaagtgtccagagtctcattccccattgtctatttcccatctgtatttgatctgactttgaaaaggtctttgaataaattgaagagcttgaagatggtgaagagaaaaatgttttgcccaactttactgttgtttaattaaactttttgttttgagatattggtaagttcacatgtagttttaagaaacaatacagggagatcccaggtactctggtaagttttccccagtggtaacactgggcaaagctacagtagaatagcacaaccaggatactaacatggatgcagtggagacacaacattcccaagaccacaagcatctctcatgtggcccggttatagcctaccccactgtccacctgcccccacccctcccgaaccctgacaaccattaatctagcctgcttttctattattttgtcatttcaagaatgttatgtaaatggaatcatctagcacgggaaccttttgggattggcgtccccctccctcactcgtggttccctgaagattcagccaggttctttaatgtattggtggttcattccttttgattgctggatagtgttctgtgatatggatgtaacacagtttaaccattcacttgctgaaggacaactgggttatttccagtttttgtctcttatgaatcaagttgctataaacatccttgtataggttgctgtataaacagtcttcatctctctgggatcagtgcccaaaacagtaattgctaggtcatatgattgtgtgtgtgtgtgtgtgtgtgtgtgtgtctgtgtttaagaaactgccaaacgtttcaaactgttttccgagtggctgtagcagcttacattcccaccagctctgcgtgagtggtcccaccaaatccttgccagcttttggtgtcctttttttttttttttggtagccattttaataggtatatagcgatgcgaagtgattttactttacacttctctaatgactaacttattgaggatcttttcatatacttatttgccatcagtaaaatgtctgtttgtgtcttttgccaattttctaattggatttttggtttttactgtggggttttcagagttccttttatgttctagatattatttctttgccgtacatgtgttttgcaaatattttctcccactctctaatttgctttttccccgtcttttcaggatcactggcaaagcaagcaaaagttttagttttgatgaagttcagttttcaatgtttcatgtcatgtcctgtgtttttggtatcgtctaactctttgcttagtcctagatcttgaagatttccttaatttattttttctaaaaatttgcacatctacattttacattcaagtctatgattcattaattttgtataatatgtgagaatagatcaaggtacattgtttttgcctacggatatccaattgctccaaaaatcagttgggcatatttatgggggtcttatttttttagttcaccattctgttctgcttatttacacatctatccctttgccaataccacagccttgattactgtagctatataaagtcttgaaattgggtagactgattcttctcactttattcttcattttaaaaactgtttttgttatttctgttttttgctttttcatagaaattttacagtgatcttacctgtatgaataaaaattgctccgggcttttgataggaatcttaacaaacctgcgcatcaatttgtggagaataaatatctttactctgttgagtctttcagtctgtgaacacagaatgtctttccatttatctggatcttgatttcttcatcagcattctgtagttgtcagcacatataaatgttttctagatttacacctaagtatttcatttttttgagtggttgtaaatggtgctttctatcttaatttttggtgtccatgtattcattgccagtgtatggaaatacaaattattctttatcttgttgaattcacttattcacccaaatatcacatcttatagaaaattaactcaaaatgagtcacgaacttatatgtaaaaggtagatgtgtaaatttttagaaaaagaaaattacggaaatcttcagaatttagggctaagcctaaagagttctttgacttgataccaaaagcacagtacatacaaggaaaatggaaaaatcgcaattcaacaaaactaaaacttttgctttgcaaaagatcctgaaaagagaaaaaaaattatggcatggaagaaaatatttgcaaacacatatacaaaaactatgaaggttttttggtaatgttttttgtttttgcttttaaattacttgaaattttctttgtagaaagtcacgtcacctgtaaataagggcaggtttattgcttccttttcaatctgtttgtcttcttttctactttatgtcttattctcctgactggaacttcttgtactgtgttgaggaagagtgatgagagtaggtatgcttgttttgtttctcgtcttgggggaaaattcagcctttcaacattgactacaatatttactgtaggtgttttgtagatgtcctttaatcaagttaaggaagttctgtatatgttctgaaaattttcttttttattttagatatttttatttctcctaatttgttatttatcaggagtgactgaaataaaaaatataattgagccctgtcatcattatcatggaaatggctttaagagaaaactgatcagatgaatactattgcctcccattttcaaccacgaaacagttgccactgataaattgacagtcaggagtctgtcaagaatgctcaagatatgttatataatacaacatgcctgttcacagggggaagcatcctaggaaataacttatgtgtacttctgatttcatcatacaagacaagcacaaacgcaccacccatgcctctgagaacattggaccatgcacccttgaaaaaagctctgcctccttcatcaggagcaatcttcctccagcagtgaagcctgcctgtgtacatgatgtcagctgcaccctgactgcatcatcattccgtggcgaacagcgtcaaatggataggaagtcaacccagcaacggcagtgacggactgcgcgatcatacggctgatgacatgtgagtgttcctggaatctggaagcattctccttgcagtgtcatagacaccgaagcaggcagctcggtagatgataataccctgcacagacctgttagagccttggtacaggcctttaatcccatcagatttgtagatcttaaccaggcggtcaccaaggccttggaattccctttcagctccagctttacccacatcagctgctagatgggtacggtcaaaatcaagagggtatacaaaacataaggatgtggccccaggggcaccacctgatgccagactccctgcaaacttgtgccaaaactggatcctcttgtcacaccccccgggaagatctgcttgtttttatctttgaaggcaaagttgagagcgtgggtagggaagtatctgatgacattggccaggttaccgtgccagagggacaggactcctgctccttgggaatgcggaccatgcagtctacaacgcccgtgtattgcttatctgcggtgatctgcttgctggcactctgcacctgcagcagcagcttgacccctccgtgggtgccaccgccatcttggagatggccgcggtcactccacctgccaggaagtccttggcaaggacacagcggcatctgtcatgttgaaaggaagaggaggcaggcggctgcgggatgggactgggcgggaaccggctttgactctggggctgcagggcggaaattttcattatgaataagtatacaaatattataaactgtttattctgccttgatttgatgtaatgttatttttcttttttagtctatattaatatggtggataattactgattgacttttgaatattgaaccagccttgcatccctggaataaaccctttttgataatagcctataatttgtttcatatacatttttttctttttcttttattttcgagacagaatctcactctgtcgcccaggctggagtgcagtggcgcgatctcagctcagtgcaacctccacctcccgggttcaagcaattctcctgcctcagcctacaaagtagctaggattacaggcccgcaccagcacaccccgctaatttatttttatttttatttttaatagagacagggtttcaccatgttggccgggctggtctcgaacacctgacctcaagtgatctgctcgcctccacctcccgaagtgttgggattacaggcgtgagccacagcacccggcctgttccctatattgttgaattctaattgctaatattttgttaaggatttttgcttgtatacttatgaggaatattcatctgtagttttcttttttctctgtcttcatctggttttggtatcacagtaatactcatttcataaaataaatggaaaagtattccttcttgtcttatttgctgaaaaagattgtgtagaatttttggtaattctcttttaatgtttgatagaattttccagtgcaaccctctgtgcctgggaatttcttttttgtaattttttaaaagtatgaattcaattttcttaatagttgcattttgttttatattgggtgttggggtcgtgtgggtttttttttgtggaattagtccatttttgtctacgttgtcaaatttatgtaaatagagctatttgtaatggccttttattatctttttgatgtctcaagagtctgtagtggtagtacatgtttccttcttaatagtaatattttgcctcccctctctttttgtctttgtctattttgctggaggtttatcggttgtgttggtcttttcaaataaccagttctttgattaatttctccatttttttatgttttcaattttactgatttttctttttattatttgattccttcagcttgctttactaatttgagactttttctctttactaatatattaatattattaggttggcacaaaaatatttgtggtttttgccattgaaagtaatgttaaattttttttttctcagcattcctttagcaatgtcccacaaattttggtctgttgtattttcatttagttctatctatttttaaattttgctataagactttctctttaacccacaaattatttagaagtgtattgtttcgtttccaagtgtttggacagcttcctttatctctctgttttttatttctagtgattgcattgtggtcagagaacatcctctgcataatccaaattatttaaaatttgttgagttttttcttatggccaaagatatggtctatccttgtgtatgctccatggtctcttgggaagaatgtttatactgctgtcattgggtgcagtgttctacacatgtaaattagaccctgttggttggtgatatggttaaattcttttatattcccactgattttctgtctagttgttctcccaactgttgagagaagggaattgaagtctccagctagaattgtggatacttctatttcttctttcagttctgtcagtttttgcatcacacattttacagctttattgtttggtgcattcaaagttagtattgctgtatcttcttgctgaaagacatttataatttatcattataaaatgtccttctttgtctctggtaattttctttgctctgaggtttgtttcatctaatattagtatagccaatccttttttccctttgattaatgtttgtttgatatatctttctccatccttttactttcaacctgcttgtaccatatttgaaatgagtttcttgaagaacacatgtatttgggccatgtttcttaatatatgctaccaatctctatattttaattgttgtatttagatcatttatatttaatgtcatgattgatatgttagggtttaaaactgccagtttatattttgttttccccttgttctgtttttatgttttgttttgtttcgcactctgctttttcatgattttttgtgagtgtttgaacattttttagaattccattttgatttatctattttttttagtgtttctctttgtatagcctatttagtggttgttttaggtattacaatatatacataacattagaatctactgatgtgattatttcatcagtttgagcgaagtataaaaaccttatcttcctttatgtccctgtattcccccaattttttatttttgtttattatttatacttattttttgggatgcagtctcactctgtcacccaggctagtgtgtagtggtgcagtctcggctcactgcaacctctacctcctgggtttaagcaattctcctgcctcagcctcctgagtagccgggactacaggtgcacaccactatgcccggctaatttttgtatttttagtagagatggggttttaccatattagttaggctggtcttaaactcttgacctcatgatccacccaccttggcctcccaaagtgctgggattactggtgtgagccaccgtgcccggcctcccctggttttttaatacagttttaaacattttctctatgtatatttagagccatatcaaagtagttctatatttttttgttgttattgagatggagtctcactctgtctcccaggctggagtgcagtggcacaatcttggctcactgcaacctccccctactgggttcaagtgattgtcctacttcagcctcctgagtagctagggttaaaggcatgtgccaccataccaaactaatttttgtatttttagtagagacagagttatgccatgttggccaggctggtcgtttcaaactcctgacctcaggtgacctgcccaccttggcctcccaaagtgctgggattacaggcgtgagtcaccatgcccagccagttctataatttttgtttcagctgtcaaacataatttaggcaactcaagagtagaaggaaagcctattgtatttccccatatatttgcttccagtgtccttttttcctttctgatgttccatggtctttttttgttgttttgttttggctttttttggcttttccttttgtctaagagaagttcttttagctgttctttaaaaattgatatactagcaacaaattctttttattttaatttacctgagattgtcttgatttcagtttattgctgaaggatattttgattgggtataagattctgggttgacaattctcttcttccagcagttgaaaaatattatgccacttctttctgccttctatggtttctgataagaaacctttttaatgtgataatttccctataagtaatgtgttgtttttctctgactgctttttagatgtctccttttcttcatattttaaaattttaattacagtttgacttggtgtggatttgtttagggttttttcatcttcttgaactgatagctttatgtcttttgcaaaatttagaaagcttttcgccactatttcttcaaatatttttcagctcttccctatttctcctctcttctatgactcaaataacaattatgttagttcttttgttacaggcctctcttggaggctgtttgcattttcttttcagtcactttctccctgttgttcagattgagtaatttctatcatcttatttaccagtttactgatgtattttctctgttccctccattctgctactgggcgcatccactgagcttcatattttggttattgtatttttcagttctaatattctcatttgatgcttctttatatcttcaacttatttgctaagattttataattttgctaaatacctctattttatttcaagtgtgtttgcaattgcttgttgaagtatatttatcatgctgcattaaaatttttgtcagataattttaacatctctgtcaccttggtgttggcatctatagggtctcttttttcatttagtttgagatccccctagtccttcacatgacaagttactttcaattaaaatgtggacatttttgtattatgctatgagcttctggattttgtttaagccttctgtcttaactggcttttcctgacactattccggcagaaaaaaatgtggagggtgctgtctagttactgccaagtggaggtagaagtcccaggttcctcacttggtcttcactggcatctgagaggtggtttcttgtaattctgagtggggctagaagttctagctctatgcctgatctccactgacatcacagtgatctcattacactgggatgatgggtaaagtcctgactttccactagtcttcctctgatgccacccaagtgtgggggttcttaggggagtgaggaatcttatgattgccgagtacgggtggaagtcagtttgcttgcatggtctccattgacactgggaggaagggtggaatgaggtaacactgctgttactgactagttattatgaaagtcttagctccctacttggccttctctgatgccaccctggcattctgttgtaccttggtgcagtttcacaaaggtggaagcctaggtgcccctaagcagcctttgctggcctaggtggggataaggccaatttttttttctgtgatgtctgctttgagttgaggctttagaggctcacctcattttatcaaagtgctttcagtgctttgtcttattgcactttgcagatttttttttttatttttacaaattgaaggtttgtggcagtcctaggttgagcaagtccatcagcactattttccaacagcatgtgctcactttgtgtctttgttacatttgggtaattcttgcagtatttcaaaccctttgattaatattataactgttatgttgatctgttgtcagtgatttttgatgatactattgtaattgtttgggagcaacatgaaccatgcccatataagacagcaaaattaatagataaatgttgtgcatcttctgacatctccactgaccagcccttctcccatctctctcccttttctcaggccttcctatttcctgttaataatcttacagtgacctctaaatgttcaagcgaaagaaagagtcacacatctctcactttaaatcaaaagcaagaaataattaagcttactgaggacggcatgtcaaaagctgacattggcttaacgctaggtcacttgcaccaaacagtcagccaagttgtgaatgcaaaggaaaagttcttgacagaaatgaaagtgctattccagtgaacacatgaatgataaaacagtctggataaaagatcaaaccagccacaacattcccttaagccaaagcctaatccagagaaaggctgtaactctctttgattctgtgaaggctgagagagagctgaggaagctgcagaagaaaaatttgaagttagcagaggttggatcatgaggtttaaggaaagaagtgatctccataacgtaaaagtgcaggtaaagctgcaagtgctgatggtgaagctgcagcaagttatccagaagatctagttaagatacttgattaaggtggccacactaaacaacatatatttagggttgatgaaacagacttctactggaggaagatgccatcaggactttcatagctggagagaagtcaatgactgacttcaaagacatgaacttcaaaggacatgtaactcttgttacaggctaatgtggctggtgactttaagttgaagccaatgctcatttaaccattccaaaaatccttaagaattatgctgactctactctgcttgcgctctagatatggattacagcctgcataacagcacatctttttacagcatggtttactgaatattttaagcccccttttgagaactattgctcagaaaaaacccaagattatttttgtaatatttgcgctctttgacaatgcaatggtcactcaaaagctctggtggagacatacaaaaagattaatgttgttttactgctaacacaacatccattatgcaccctgatgaaggagtaatttcacctttcaagtcttattatttaagaaatctatcttgttaggctgtagctaccatagacagtgattcttctgatagattagggaaaattaaatttaacaatttctgggaaggattcaccattccttttaatgccattaaaagcacttatgattcttggaaggaggtcagaatataaacactaatgaaaatttgaaagaagttgattccaatcttcatgaatgactttgaggggtttaagacttcagtgcaggacgtcactgcagatgtggtagaaatagcaagagaactagagttagaagtgcagcctgaagttctgactgaattgctgcaatctcatgataaatcttgaacgaatgagaacttgcttcttacacatgaacaaagaaagtggtttcttgagatggaagttactcctggtgaagatgctgtgaacattgttgaaatgacaacaaggaatttagaatattgcacaagtttagttggtaaagcaggagcggagtttgcgaggattgactcaattttgagagaatctttactctgggtaaaaagctataaataccaactcatgctacagagaaatctttcatgaaaagaagagctaatcagtgaggcaaacttcatcgctgttttatttttgaaaattgccacagtcaccccaatctttagcaactatcacactgatcagccagcagccatcaacattgaggcaagaccctccaccagcaaaaagattacgactcactgaggactcagatgatcattggcatttttcagcaataaaatgtttttaaaattatggcctgtacatagttttttttagacataatgctattgcacacttaatagactatggtattgtgtaaacataacttttaaatacactagaaacaaagaaatgtatgtgactgtctttattgtgatacttgctttcgtgtggttgtctagaactgaacccacaacatctccgaggtacgcatgtatcatttcaaaatatcgtcttgttggtttgttcgtttttctttggctagaagagcatttttgtccgagtttttcccccctacgcatgtccagtttgccagcttcttcaataccacagctgaaatacctgaggcaaaaggaaacaccaggagctcaccaccatgtcagttctgtttttgtctggctttatttttatttagtagttgaaaaatgtaatcaatgtctattcctagaaatactctcttcacttggtttcttaaaacacatatgccgctggttttccccctacctcactggctgattctcttcttcattttgtttctttcttttcttccagactcgtaagtactgacatgttcctgtattcagagcttgatcctcttttcttcgtgtttttctccactctaaagctggctgcatattaaaatcatgggaacgtggccgggcgcgatggctcaagcctgtaatcccagcactttgggaggccgaggcgggcggatcacgaggtcaggagatcgagaccatcctggctaacacggtgaaaccccgtctctactaaaaatacaaaaaattagccaggggtggtggcgggcgcctgtagtcccaactactcggagggctgaggcaagagaatggcgtgaacccgggaggcggaggttgcagtgagctgagatcgcgccgctgcactccagcctgggagacagagcgggacaccatctcaaaaaataaaaaataaaaaataaaaaataaaaatcacgggaacgtaagatgcaaacatgtatgtctctaattttaggcggtcctagttaattctcatatgttcccagggctaaaaacaactattagcaacaggtttttctaatttttaaagaaactatttatttctttttctgttttttaaaagcttttatgtttatccagattatatatgaacccactttaaagaattggttctttaagttttgttaattaaagaaaaatatatattctggatagtaactgctctctatgtacatagtttccaagtatttcctcctattctgtaggttctctttactctgttgtttatttcttttgctggacagaagcattttaatttcgtataaccctgtttgtctatttttgctttggttttggttgcttgtgcttttgaggtcttctccaaaataatccatgcccagacccaggttatgaagcatttcccctatttttttcctgagtagttttatagcttctaatctcacatttaattctttaatccattttgagttgacttttgtaaattgtgagagataaggggtctatttcattcttcttcttgtggatatctaataaaaggataaaagatacccttttattaaagatactgctctttccccagtgtgtgttcttggcacctttgtcaaaaatcagttggctgtcaatgtgtgggttcatgtctaggttctctattctgttccattggcctacgtgtgtgtttttatgttaataccatgttgttttggttatgaatgctctgtagtatattttgaagtcaggtagtgtgaagcctccagcgttcttcttttcactcaggattgccttggctattctgggtcttttgtagctccatatgaattttaggattgttttttccatttctgtgaagaaggtcattggcattttgatagggattgcattaaatctattgattgctttgggtaatgtggtcattttaacaatatgaattctttctattcatgaacatggatgtctttccattatacctcttcaatttttttgatcactgttttatagttttccttgtaaagctctttcaccaccttggttaaatttatttctaggtattttattttatgttttgtagttattgtaaatggaactgccttttaacttttctgtcatcttttggaattcctcttattcagatgatatatcttctgctctgaccctttaatttttatatcacttctgtttcttattattattctttctactctatttaatgagactttttttaatcaattttacttttcaagcctattgtacttttatttatgccataatcttaagttctaagagatctttttaatttccacatttcctccttttcatctcattctgctcttgattcatgaatgcaacatcttatcactacaaatatataaataacaacgtatttttagaatagtttattatttagatttactttttttctgcataatttctgttactttttatcccaggtttctttttagctgttaatttgctttgtttggtgtttatctttgctgttaaaggccttcttcagatgtcagtaatcttgggttatctgatcacatatgagtgagaaatgaacaatgtgacttgaagttcttgtcagtgcaattgtatggtgttggaaacatgttttggggatatcctggtgttggaaataatcagatgggttttttcccccttttgtgctagtcatgttccctggagaagattccctgcatattctactggaggtgaaacgtggaagctgagtggcaagaggggctggagggagcactggcattcagggtgcatgtgtgtcctcacttcgccctttagtttttgcctcagtccttaggcctccactgtgccttttgtactttaaggagaaacctttaaggagagacctccccccctcttctttcatgctcccatggagtataagcttcctcttttatagccatggagtgaggaagttgctaagtgatgttaaatggggaatatgagctacatttctagctaaagagctttacaaatccgtctcctccctgtctctactaaaatacaaaaaattagccgggcatgctggcacgcacctgtaatcacagctaattcaggaggctgaggcaggagaatcgcttgaacccaggaggtggagcttgcagtgagctgagatcgtgccactgcactccagcctgggtaacagcgagactgtcaaaaaaaaaaaaaaaatccatttcctgtatgttagcttgcttccttgcttccttttacttttacttcagagatacttggtgccacccatttctgagtctcttggaaattctggggtttaaatgagactagtttttagctttctcctgatagtttagaatttggattccggagtttcctaagtaggattgtctcaggcctacttgtcacctacataaatgtgccatttttctcttctcttactctctccatcctcctggcttcatttttaaaaattacttttactgacatttgatagagtttcagtgttgcaagggagcaaagttagttgcttgagttcaatctgccgtagctgtggaattctacattctaaatcttttctttggtgggacacgggctcggttgaagagtagaaaagagagagaacaggtgatgctgactgagttttgggtttgggggaatgtgagagagtgagactggagaggaagaggagatgctgaaagttacatggagaaagatgggtggatgtttccatgacctccacttaggagtctgcacttccttattagtctctgatatttcagtcctgcttagtgacctttaagattgccctattttttcactggaagttgagtgaggacagaggtagctgccagcaatatccactgtggccccacctaagcttaccgcctgggtcactgtacccacctccatttcatcactagaagagttctgagaacaggacgtgaagacagccttccaggccagaagcaggccaaccaggtttcaccctcacgctcaggtgtgccaagggctttgattcctgctgttcatccctttggaaaaatattgcccaagcctcctgataaccgcctgtgctcctgaataggtatttgtttggagaagggtaggacttcagctaaagcctttaaaatgtgctatttgcttgacttaagataatcaatagacactatctatggctaacttcatattcttatgatgtgggtgtttttttttcctttgtaagtcacctcaaatcctaatggaacaggaggtatattaagtactgaaatgaattaaacataatcgatttcctcagtttagattatttgctgtttttggttcattgattttcttgggactggaattcaaatgactgctaggtaaatcatctttcaccttatattatctattgataagtaatgattaggttggcatatgtcactacaccaagatacatactggaagtaatctgttacttgcaaaatgtgaaagcaagctaatttcaggtcattatttgtattgaaagtccacatttcgtgtccacatttggtgagttaaatacaaattaattaggaacatatggacaaaattcctcttgtaacagggacagacttaaaaatgagaatatatgtgcttgataagagattgagtttagaaaatacataatttaatagtttaaattatttaataaaagccacaatatcactgaatgcacccacatgaattcctataagttaatattgagaatagggatcatatattttactaaatatatgttagtaaaccatgcactgaacatcaaaacttccataagagtaggagaaaagggcaacatcaagtttaacataaacagaatacttgagtaaggtgccatccttcaagccaacatcaatagcactcagagcacaagatgcagaaaggtgggagatgagagagagaagaggctctgcaaactgagttttgagattctggaatcttcaaaagagggagcctagagatagagggaaaagctaaagtttgttagcactgtggagaaagctagagtgcaaggttctgcacccattgcctaggagtttgcattttcttattataatccaaatttggggtctttgatacctctgtcaacaaggatgtgatgtcctgtgaaggtacagagacctgccagaggtgatttacatcgggccagatctgttgctggccctttaaatgaagacggccatcttagtcatctctggctgctataacaaaaataacaccgactgggtggcttaaacaacagacacttatttctcacgattctggattctggaagtctgagatcagggtgccagcatggtcaagttctatgagggccctcttctgggttgcagactgctgacttcctatggtattgtcacatggcagaaagagagccggttagcttgtaagggcactaatcccattcaagaggtctccaccctcatggcctcattacttcccaaagaccccactctaagtaccatcatactggggattaaatttccacatatgaatttgggggagacacattcagtcctaacagccaccttcctgggagggtgagcactaaggccgggtgagagcccagcatgtgaggccgggtgagagcccagcatgggcccaactatgcacccagaactgtcttctcatgggtctctcacccgcttgtgcctgctttgtgtgtctctggcattttattcctgggctctcaatacccatccattctggagagccatttgatgtggtgaattcaccaacttcagcttctatgtaagctcttcaccccgtactggatcagtttggtggattcaaacccaatgaggtcacaaagcttgccaaaagttcgcttttattgcagcaaaatatgtagctattacttgtggcatgcagatcagctacactgggtaggcagaggaattcccagggttctaaaccctattcaggaacacttctgggcactcagcagtaacagacaggacccaccgaaaaggacgggtcatcttgcctaggcagctgcccatgttcagtcctctagagctgctactctgataccaggctatttattactcttataaggtaaaaagaaacagctaaaaccatacacacacacaaacacaatcatgattatatgactcatatacacaggtattcagccatttgagttggctcctccttaaacactcatctttaggctgggcacggtggctcatgcctgtcatcccagcactttgggaggctgtggtgggaggatcacttgaagccaggagctcaagaccagcctgggcaacatggtgagaccccgtctctgcaaaaaaatagaaaactcagctgcgtgtggtggcatgcccctgtagtatgagctacttagggggctgaggtgggagggtcgcttgagcctaggagatcaaggctgcggtgaagtaggattgaaccactgctctctagcctgggcaacagagcaagatcctatctatctccaaaaaaaaaaaaacaataatctttagttgtccctaatttatatctcattatagccccttgattttagcatcactaaactatgagaaagagacacttcctccgccactcccttgtcttatgaatatttcattgcctccccacgataccctcctgattggtgagaacaatttaaacaagcaggcttgcaagctgccaggatgcgaaactcccaaaatccttcccagacaaggtccaggggagagaggctgcctggcacttcagatatttgtgtcattgcattgctcttttaaaataacttcctttgagctggagctccaagacaaagataataataacaaaataactaattttttgattgacaaataaaaattgtatgtatttatggtttctcttctacatataatactattccctacccttctgtgtttttttttgttttgttttgttttttgttttttttttgagatggagtctcgctctgtcacccaggctggagtgcagtggcgcgatcttggctcactgcaacctccgcctcctgggttcatggcattctcctgcctcagcctcctgagtagctgggactacaggcgcccgccaccacgcccagctaattttttgtattattagtagagacagggtttcaccctgttagccgggatggtctcgatctcctgacctcgtgatctgcccgcctcggcctcccaaagtgctgggattacaggcgtgagccactgcgcccggccccttctgtttatgtttgtgaaactcctaagcaccattctaaactcagcacaaatcttaaccacttcggttacaatttcctctgggcacaattatgcactcacttctctgtcttcctgtagcatttcctcattctatagtgcaggatttactggcttatccttacctttttagatatttaacttcccttccagatgatgggacctcatagggaagttactttggtcctccctttacactcagcagcaaacacataaaaggccctttaaaatgttgaatgaataaacatgggacacattgttgatcctttatgtttccccagcatcccacccaaaaacagattcaaagtacaaggaaggtaacagtcagattcctcaaattcaccaaaagaaagtacgtatctagaacagtcaacttaggaaggtgtctggcctgagggtttggttgagtgtttgcagcacattatgtatctccagccctggcttggtagtcagtttggttttttgttttgttttttgtttttgttttttgagacagagtctcggtctgtcgcccgggctggagtgcaatggcgcaatctcggctcactgcaacctccaccttgcaggttcaagtgattctcctgcctcagcctcccgagtagctgggatgacaggcacccaccaccacacccagctaatttttgtttttttggtagagatgggggtttcaccaggttggccaggctggtctcgaactcttgacctcaggtgatccacctgcctcggcctcccaaagtgctgggattacaggcatgagccacctcacctggccgccagtttgtttttttgttttctgttttattcctggaaactggagaaagaaaactggagaagtcgaatgatctaatgtgaatcctgtgtccctaacacttaagacaccttgggcctaagcacacaataaagaataagaaaaataatgaaaatgaaaagtcatattcatttcttcttacccccaatatttaattttttattactataaaatggaatattgttctggttagatgagattttcatacactgtaaccaaatttcttacaagtgtatgtcaattttaagattacagtagtatttaataatattgcattttacccaatgaacaggtaaaataaaggaactttattatagttctcatatgagaactatgactaaccacactgtcctttcggatatttacatctgaagtatactctttgaggggattcaaatattacaaaaccctttgtaatgggttgtattttatacgaaatgtttgttttcttctgagagcagtcaggttgaatttaaaaaggattacagtacaagaaaatgtaactttttttttcttacagaactatcatgaagacttacttaaattgaccttatttgtagtttatcctgatctcgagcaatggtggttttaatactttgctgcgttcaggtcaaaacaggtggaccttaaacagttgactcatgatggcatttgtgctctgatagtaacagctggttgctttgtatttcaaatgaattttacaacccagctaatggctctttgttctcagataggaaaaggtctgtaacccttttctccctccttgggaacacctgaagcaagcttgaccctaagcagacctccttgcaaacatccactgctaaactggggtctttcaggggtttcctgtaccaattactcatcgagaaatgcttttagcaagcaagatattcctggtctgtctggcacagatagtttattgtcaacaaacctgtgatttgttgcagctgcgttgaagaatgaatgttggaaatctcaccagaaagagctctgtgacatggaagatgaacaagctgagagacccccaagctcagtggcagctttgtactatcctatccccaacaccacactctccctcggaagccaaaactcctcctggcagagaagggcactcaggaagccacgtcggatgggctggggaactcctagatatggatgctgcacatgctattactttatcatatataatctactaattatcaataacagtgtgtaacatatacaatccactagttattagtaactgtagtctgttaataataacatcatcgttgtcatcatggctgtgacaatggggcagtctgccctctccctccccatctccacgatcatctatatttatggaacatacatctaaatgcattattattttcattctgaacatcagtatgaggggtatgtattccattgcctccctatctatgtaccaggtgctgggcattgaggggtatacagaccttggttctaccctttatgatctaaaacagctgaaagtattgacataaggatactaaaaactaaatagaggctgggtgtggtggctcacgcctgtaatcccagcactttgggaggccgagacagacggatcacctgaggtcaggagttcaagaccagcctggccaacatggcaaaactccatctctactgaaaatacaaatattagccaggcgtggtggcgggtgcctttagtcccagctactctggaggctgaggcatgagaattgcttgaacccgggagtcggaggcttcagtgagccaagattgtgccactgcactccagcctgggtgacagagtgagattccgtctcaaaaaaaagaaaaaggaaaagaaaaaaaactaaataatttattgacattacagatataatttaattttaactactaagagcacaatcagaacaattctgttttccatatccatttcatgtccctcctggcaccctgaaagattgcatgttccagttatgtggggccatgcacccagtttgtagtcagtggaatgaggacagaaatagcactacactgtagagaaggcaagcctcgcctctgttgaggctattctgagatctcagggtgcccagctctgaagtggagcagggataaatccatggttctggacatgacatgtatttcatgtaagtctgattgacaattaaggattttgtgttcatttgatttaaaagtcacagaaaaatccaaccttcaattgtcttcacacaaaggaatgactctaattgcacatctgactggaaaactgtaaagctgggatatggcactcttgccgctgtgtggacgcgggcaccctggagctggttctccactctgcgattacctggctctcttcggattctactaagcgtggaagaagttacttagagcgaatactttacatttactagtaagatagctgcacaggctgggacttttctgacaacagtaatgattatcattagttattttaatagtttaaatagtgccttggagagtaagaagatctactgttaagggaagaaaaaacacagctgagttgtcttattaatgaattgagctgctcattagctaattttttccacagtctttaatgatctcctggttaatggctgctagaaatacagaagcactttaataagggctctcagtctaaaacatttgcagctgtaacattgactactctgcacataataataactcagccaacttttcctgtgtgcttaccatgtgtcaggcacatgtgggaacagagaatacctttatctgaaaagacaaacagccttaattcatttggctacctaacgggtttctaactcaagttacacataaatttattaaatcgggtcaactgatgtaattagccaactgttaaaaattgtgcagacggagagagccggtggatcccgatggtcatgacttatgagaaggcatacatcacaccttgcctctatggggaagaaaattcatttttcacagagagtgtaagtctccatcctgaggtaatagagaagagagtttgtgggtgtcttgttgttattgttgtttctgtccttaatcttcccaccttgcatttaaaaactcaataaaaaaaaaaacagtgactataagtcaccatgttctttgttatggaagagacaatgtcttacaagcccttaaagttgaagtctctgatgccctccagcagttgactggggatacctggttacttgtcagctcctaaccgggacacagagtaggtcagagaagtcgacccgggagtgttgggtagcagccaagcgtgcagacgcgggaggtcagccagcctgcactgaaatgccgcctttccttgtgagaaactgcgactttgctcaggtgaatacgttttcaacatttcactttcctcatctctgaaaatggagccctagtaacctcctcactggactgctgtaaggactcaattccaacgcgatgatacatacgatgtactggtgtgcaacgggtatccagtggatggcagctatgatttttgtgtttattattaataatgggagtacaacttgggcaggttcatctcggtgatatgaagcttcggtttcctctgcctaagatttgttgaccctcctgccaaccaggacttgaaccttgcccaaatttctgtgtatcttttttaagctttgccaaactccccccacaccccctactcccatccagaggctggatctgccttttacccctgtcaacaataccgttgcccactcccctcttcccacctgccccccctccccagccactggttgtatttctgtcatggacaaaatcatcaaaatgatgctgatgccacttgctttttagaatcagcggacacagtgacttccttccgtatccctgccccacttatcagctgagcacctcggatctcagaaattgcctcagcggggcactaggcttgactgttgtacaatgaagcactgagctgccacagctggggcaccattgtactacgacggtgtgtttcccaggctccctccccagcttctgtctccttcctgttggcttcggtcctggcgtgcctcacatatgagcactttgtgttaggctacgcaaagaaataagaacagcaaccgcatcaaaggaggttacaatttacctttcaacacaatcatcatctactcctaatttccccacttgggcgattagtataaaacttattattttactactttttatgtatcagtagaattctattaataaatgccagtaaagcatacaattcagtaatacaaaccttgttttatcctatcttatgttggctggctggtgtagatcacaccactgaactccagcctgagctcactgtaacctctgccttccgattcaagagattctcatgcctcagcctcacaagtagctgggactacaggcatgcaccactgtacctggttattttttctgcattttctgtagagatggggtcttgctatgttgcccaggctggtctcaaactcctgggctcaagcaatcctcccacctcagcctcccaaattgttgtgattgcaggtgtgagccatcacaccaagtctcacagcgattgttaatcataatttgtaattattaattagataactccagaaatatacatgaacttggtgataatttactctgataatacatcatacaaagataatataaattctgccagaatactctgtggcttcttctgcttcccaaatgtcctacataaaactattaatacttgtaaaagacttcagtgaagaatgaatttcccccagctgagcaagcgtaatttggctatggccagatgaaggagcgttctgaagcaattcttggcatggaagcaaatggaaaggccttatgcataggcaaccaagaaaaaaaaatctaaacaatttaagatgcagtgacttcccaggtgcaggtgcatcagtcacatactccatctaccatcggcatgtcttgcttttgtaacaagagtctctttctataatacgggcagttggtcttgtactcagctgggcattcagcatggctcctgtctcagcaaacggagtcggaggggttagctctggtgtaggatgcctgcctgggtggcaatccctattggacaggtgaaaatagatcattattttaaagtcttgatccggccttagaggttcccctgtgtttcctgttctgctagagctgacagctaggactcctcaagctgtgcacgattgctttctgcactgtgtgtggctggagcctctaggttagcaatgtatctactcactccagaacggtcttttcataaagaaaacctgggctgggcgtggtggctcacgcctgtaatcccagcactttgggaggccgaggcaggtggatcacgaggtcaggagatcgaggtaatcctggccaccatggtgaaaccccgtctttactaaaaatacaaaaattagccaggcatggtgatgggcgcctgtagtcccagctactcgggaggctgaggcaggagaatcaggtgaacccaggaagtggaggctgcagtaagctgagatcgcaccactgcactccagcctgggcaacagagcgagacgccatcacaaaacaaaaacaaaaacaaaacaaaacctgatatgttaaatcactttaaatcaagtttgtccaactgcggcccatgggctgcatctggcccaggacagctttgaatgtggcccaacacaaatttgtaaactttcttaaaagattataagattatttttggcaggttttctttttagctcatcagctatcgttagtgttcgtgtattttatgtgtggcccaagacaattcttcttccaatgtggcccagggaagccaaaagacgggacacccctgctttcaatgcttctcggtgctcttaggataaagacccaggttcttcccatggactctgcacccgatacagcctggcccgcactccctctccagcccctctcctaccgcatgccgctgcccccggccttgtgtcctccagcatggtgacctcctctcagtgtccagggttccctacccccacaaggcctttaccatctcttctagaactccgctctgccttccagttgtgcctccactgtcacttcatctggaagctgtttctgccctttcagaccaactgggtgaaattgctatgtgtgctttcttatgccatgtgtcactcctccatgccactggccacatttttttttttttgagacaaggtctcactctgtcaagccatcctccagcctcagtctcccaagtagctgggactataggcacacaccaccatgccagtctaatttttgtattttcagtagagacgggtttcaccatgttggccaggctggtcttgagctcctgggctcaagcaatctacccaccttggcctcccaaagttttgggattgcagatgtgagccaccgtgcctggcccactcagcacgtttcaatatgacacgtatctgtgcaatgacgccgttcatatgtgcctcatctcacaaactcgaagcgtcatcaagccagagacaatgttgactttgttcttcatagcatttccagggcaagcatggctcctaggataaagcaagtccccactgacacatttcattaaaagcagagaagggttagaagttcatcagccttggctggtgcagtggctcacatctggattcccagcactttgggaggccgaggcgggcagatcacctgaggtcaggagtttgcgaccagcctggccaacgtgtccaaaccctgtctctactaaaaatacaaaaattagcctggcatggtggcacatgcctgtaatcccagctacttgggaggctgaggcaggagaatcgcttaaatccgggaggcggaggttgcagtgagccccagaggagccaggtcatccccagtcagcacctcccaggtcaggtcctatttctccaattgctcagctttctacagctgcgcccactgtgggctgctcaccctcagagcccaggacaggtcctattcctcgaatggctccccgaatggctcagctttctacagctgcgcctgccgtgagccgctcaccctcagagccctcatgtctgcagctgatttttgtttgcagttggcccacttctgttccttattctgcctggaaccctgcaagtcattgatccctcattcaacctgctcctgggtgctcagcacaggctcagtggggggcctggctccagtccaggtcaccctgtgtaagcaccaaccttgacacttcataattaatgttgttgccaggaagctctgataaagccattcacaagcccaggtgatggtggaggaaatgtcattcttcctataaatgcttcccacatctcacttattttcatgacagggagctttttgctgtcaggtttttgcctcagacagaaattcatcgctttcagcgcattatccctatatcaacccttctgtcactgttgctttgcattgctgcattaataataataaaaaggaactcatgtttatcaagaaaaaacttcagagggatacattgaaaaaaacataaaaaatgctcagagattgagattgcttcttcaaagctctggacagacgaaaaacacattggttatttacatatcgacaggttcttcggtaaggtcaagagtacatcatttccaactaaatgttctaagatattaactgtcttttttacccatgtgaatatcataggaccgccaagtgaggcccaaagctatccgtttttagaaatgtatttgtagtgatagtcctggcacagctcaaatatatcctgaacttgacctgaattgtaaattaattcttaacgctttttgcaaaacaatcccctgcctttgggagatgggagaatgggtgctcctaaatcactcgatcatcacgagatttgctgtttgcaaaccggggcagactgccatctttacagactaccgaggaagaaacccaggaaagggcttattgtttttgagatttatttcaatcaagatctgaacccctgaggcctttgttaattttcctctgactcttcatgtatttcacccttgccttctttttgatttcccatctgtcttgctctttttagtttcctatcgaattttgtttgttttgtacactaattctttcttctatatgtgtctttgatttgtcccctaagtcctgacctgtttcaggctgtattctctattactttcatcctgggacactttcctttgagttgccctgatgggtgaactcagaccacagaaggtcaagctcagacacatcttgtggtagataatctactggttacaatttttttttttaatggttcctacttagaaactcagtcctccagcactcatacacataaactctcagttactttttcaacaaaagttttcttagtggtgaattcattttaccaagaagtattcagtatgtcacataaatttgcagatgtaatattttatatatatatatccaatagtacaacataaattcaatagtactataaatcacatttcaacttaatactattctgatgggtatagatcgccattattgatgagtagattatctaactcaacacttctcataggtgttgtcatgaaatgctggtgagtgagtcatagtacaaaaatataattttaatacaaacagatacttttgaggataaaagagactctattaacaattacactgggacaagcagcatacaacatgaactgctgtgggccaaccggcatgtgtggtcaccttagcgacaaccatcctgaagtgcgctacagatcacttgaaaaataaccacaaaactgacatgcaaatgaggcgggttcgacgagattgctcatttacaacccagcatgctttcctgagtgaaggaaaattattacaaatatttttggggttttttgtttgtttgttttgagactgaatcttgctctgttgcccaggctggagtgcagtggcacaatcttggctcactgcaagctctgcctcccgggttcatgccattctcccacctcagcctcccgagtagctgggattacaggcgcccgccaccacgcctggctaatttttttgtatttttagtagagatgggttttcactgtgttagccaggatggccttgatccctgacctcatgatctgcctgcctcagcctcccaaagtgctgggattacaggcttgagccaccatgcctggccaatatgtttggtttttaagttataaatattcctcggtagctttatatgaaccttcttacaaagtgccagcattatgggggccaataccttaaagttaagagcagatgagctagacaaagttaaccggaatttaatttttaggaaattcaaagtgaatgtctgtgaaaactagggtttataatttgcactagttcacaagttctctttcctgaattcccagggaagccagactcccacttaccaccttttgaatcttgaaacaccctcttcctcctcatccaggaccaaggtttcctagaaagctctatcatttttccagattaacttgaaatagacaatgtccatctgagatcatttcaatcttaaaactctggcttcaaactaaggttcaggtaatagtcttgcacctgagtcacttctaattcatttggtccccagttctgataggtaagaactggatggaaggtgccctctgttgggccagccctatgcgatcttcctctccctcaaactcccttcacgtggtctccaccgcccagttccatgagcagaacccaggagcagagcatggggttctttagatatgtcaccaagggacgtgccacttggggttaggaagtgacaaatctgtaagcagcaggaatttcttttccctccaatttttcacgcagtatctggagaagcaaagatctagatctgggcccagggcaaaataatatgtctagttttgggagttgtgtcctacctttctcaaaaaagaagtgcaaggatttgactggtcctaggcttccagagggaatttacaacaaacccagagagaagcagggccttggggcctgaaggagaattatcggcagcacacaatctataggagtaaagaaagtgtgacacatgcatctaggtataattttctggcaaatgatttctttctggtatgaaattgttgtaaattatgaatattgttaaaagggggaatcataatgcacttatgctggctctattcccagaaatagtataatatataatatatgttgtggaagggttcagaaacaccagtgttatatttctagttatatacttccacgtattattctagtagtttcatgcattttgatttttttaacctacaagtggatcagagcccctgggaggaggaaccacatttcattcaccactgggcaacaaagaaaagccagactgagactctgcacatgcacatggtcactgcccttccatagctttcagtccggtcatttcatagagttgtctactatgcaaataatcatctactataagactatacattgaggatatgctaaagaatatcaggtaactgtctaaaaagatatatatgcaattttttagtgcaatgagtattctaagattcagcagtgtatgctgttcacaatgttcatggcaaaagttagagagtgtgataattccctacagcactcatactaaagtgccaggcatcaaaataaaaaggtaaaggaaatgtattatcccacagttctagaaatccaaaatcaaggtggcagctgggctgctctacctctgaaacttgtaggagaaaggccattccttactcttccagcttctagttgtttgccagaaatctctggtgttccttagcttgtggcagcacaatttttattttcgcctccttgttcacgtgatgttttccttctgtttctttgcagcatcttccctctgtgcttgcttgtgtgctaatctcctcttcttataaagacaccagttattttggattagggcccaccctaatgatctcacattcatttgcttatatctgcaaagaccctgtttctaaataaggtcacattctgaggcagcaggaactaggacctcaacatatttctttgggggaggacacaattcaacctgtgacagatggtgttgctcttccgttagttgacatcctgggaaccatcgccttctcccatttatcttaatattctggtccaagatcaagaaatggctgaacaacaggaaaatatgaaaaaaatggtagctaaactaggaaaagaaattttagtaaataataatcatcctggaaatgaaggtaaactgtaagttgctcaaaagagaattaaatattgctcaaattcaccacaggaccaagaaaactagatcaaaataaagaagttaagaagtataatagaaaaaataataggtatagaagataggcaaagaagatggaacatatatataactggaatctgcaaagaaaaaaaccaatagaatgtaactaatatttaaattataattcaaaacaaatattcctgaaggaaaaataagacctaattctatgaagctgagccacaggaagttgctggcattcattttctcacctgtaccaagggtagcttcattggactaaatccaatatacatttaaagggcccactggctgtctgggtaagaaattacccacagtgcttaactctggaaactatgccaataaaatgattaacgtttagagattaagaaaaaacttctgtggctttaaaaaaaactaaaaccatttacaaaggaaagaaatattttttggtttacagcagacttctcgaaaacatatacaaagcaacacaacaatggggcgatattttcaagaaactcaaggaaagaaagtatgagtcaatgatgttctatccagccaagtttcacttcaaatatgaaggctctggaaaaacaattttaaacatacagaaacactttgaatgttgtaaccacaaatctttcctgagaaatcaactacgaaacaaacttcctccacagatgtgacgatgggagaaactttgaacatagtactggtaatgagtattaattatatttacatgaaacctaagatttaaacaaagattatgataaggatggaagaatagtgtgtagatgttaaaaaccctgagaaagtaaaaataatttcactttaaaaatgagaaaaggagagagaaagcagactaagctcattgtatgctgcatggataatagaggtgtgtgaacaatatcttcatactcaggaggctgaggcaggagaattgagtgaacctgagaggcggaggttgcagtgagccaagatcgcaccgtttcactccagaccaggcgacagtgcgagactccgtctcaaagaaattaaaaaaaaaatacatatatatatatatatatatataatcaaagccaataaaccaagcagtgggaacctaagtagggaaaaggaaattaagaattttattcaaggtattaacaggaaggttaccatcaaaaagtgaatacaaaacacacctactataattttattttgaacagaaagagtaacgggtggttgccagaggttatgagtgagatgagagcttcaatataaagcctcattccttagcacaaaggaatgttctgggatgatggagcggtggtgcatcccgattgtggcaacctatgcatgtgttagaatttatagaactgtacaccaaacacaaagtcaatgttactgttgtatttgtctattataaatattatttgaaaacacaacaaaagcatacttgtcaagtaactgaataaataaatgaatagacaaccctcctccaacctctaccagaaagagcaaaggcaataaatgacaaggtgaaaaacacattataaatatcatgtaatacatacagtaaatataaaataatgacaaaacaaacacatgagtcatattaatatatgtaaactggcttaactcacatgtggtaggcaaaaaaattagcccctcaaagatgtctacctcacaatccccaaaacctgggaatacgtcacattacaaggcaaaaggtactttgcagatgtgattaaggtaaaggctttgagatggggagaggctcctggtcatccaggcaggcccaatgcagtctcaagagtgcttagaagagaggcaggtgtgccagggagagagagaaacagaggtccaagcgatgtgggaccctgagtcaaggaatgccagcagcctctagaagctggaaaagctgagggaacagattgttcccaggagcctccagaaggaaggaggcctgctgacccattgtgtacttctgacctccaggactgtgttgttctaagccacaaagtctttggtaatttgttatagaagcaataggaaactagtacatcatcattttagattaaaattatagattgggtcacaaaataaaatccaatggtctgctatatagaacaagcacacctacataagctttagaaaggctgaaaaataaaggtatagggacaggtacacaggcaaatgtgcacacacagcacagcgctgtgattttgataccagcaaaggtagaacccagccctaaagtgttaagtgatgcaaagcaacaggcagaaagcaaggagttccaacaactaatggggtgggtcaaaaggtcaacgtaaaggagttctcattggccaaatctggggcaattcgagctttgagaaggaatgattgatagcagtatattaaatgagtaacattccaccagtgtataaatgacatcagaaaagagaaacccgagaaatttaactcgtttgccactattagagggaactgtaatatcaactctttgctctaaagttggtaatttaaaagaaagaatcacgcattttactgtacctttttagagaaaattatagttcctttccagctaataggtgaaaggtcttctttacagaataatgccagctaattaatctagaaagaatgataggatgaaaaaacaaccatgctacaaaccccagtgagataatccattcaggccaagatcatgacggacgctaaagcctttaggtgaaagctttttgggacataatattcagaaggtgtcaaagcatcagccctctggaagggaaaaaacagcctttgtaatggaagtatctgaaagtcaccccttatccaaaggatccaacttaataccactgatagtgaaacaccctgacattatgtgaccaagaagtaatgcactatgaggccgagtgcggtgactcacgcctgtaatcccagcactttcggaggccaaggcaggcagatcgcttgaggccaggagttcaagaccagcctggccaacatggtgaaaccctgcctttaccgaaaatacaaaaactagcctggtgtgtgttctgcgagggaaatgcttgaggggagaagaaaagacacacacacaatacctttaagggtaaacaacctttatcccatgtgaatgacaatgcagatataataagcaaatgatataataagcaaattgatataataagcaaactgatataataagcaaactgatataataagcaaattgtaatgagaagggcagaagggaatatatatatatacacatactcaccaggctatgaaggattcaccaccagaccgggaagcaacagtctgggctccagagttggacactcgtttgtgcatagacaaggagaggtctcgtgatgcttcggcacggtctgggaccctagctctttttgtaatgagttgtttggcatgaggcccagtcacgcgggccctttgagactgggctcaaggaacacaaaaaggtcgacttgtttttgggattgtctattatttttcaataagtaacgtataggaataaattgaaatagagatttctccaaaacagcactggatgaacacctcaaggggctcacacgacctgccccgggacttggtgaccattgtttgtgtccatgttcaattgagttcaaatttaatatttaacttttcctccacattcggcctcaattttgatactcaattgtaggaaattgcccttacagatacatggggaagacatagttgatacagattacagatacagggttagcacaggagaattaaaagcacagttaataaaaaccatacccatggctttgcaaggggagtcatattgtgagaattaccaacaatatacacacaacattcagtatgcagtaaggtgcagacccctccttggactgcagtaagcatatctaatgccattcgattttacaacacaacagtacaaagctgagcaaatacatctgataacaacataagtccagtgctacacacagtgtatgtgtatgtatatagagagatggtggaaggaaggggaaatgaggaggagatgaaacaaaagaggtactttgataaaaattattgttggtaaaaaatataaacagagctcagcctctctctcttacggttccctgtgcacacatactgtgggtcggcgtctggggatgaatctccagtttgcacctcgttggcttgtgctgccccaggtctgaaaggacggtcttcagctctctaggtggggctctgcattccccttcttgtcctgggtgtttctgtacctccactctgcaactgccccagggctttgagaattggctctcatctctggatccttcatgagaaaggacatttctttcctagaatgcccaaaattcgatcttccagatgtcttcttcattcttcatttcttctacaagtctctctaataccatctcctaaagctcctgcttttgctcctgattcatgaatatccagccttaaatgttgctagaaatatatccattgtccagtgttcatcactgaatctacccattgatgaggtttcactttcttctatttgaatcctgaaactgtcgaatcgccaaacaaataatgaagagcaactttaactgaggcgggaagggtggggctttaaaccctaccctgtgtggcctcccttgagtggcctgtggtgtttgtgaggcatcttcaggaaccacaggcactgtgaaaacacaattttcaaaacactggtctccatcataatctgaatgtggcctctatcattcctggctgctgtcttcttgcattatgctaatgtttctaacagtccgcagcaacacattcatgcccttcactgaaaagctacacctcacgtggctaatcccattaagtccctatttctggtctgaggaacatacctgattatcagttcattcggtcattttgtttagttccttcttttgcattaaaaaaaaaatgcctagtggaaaacagtggtttttattagttggcaagcttcatttttactaacttttccaattgtttcctaatgactatatttgtcttttaaggttgctatgacaaaatacctcagacagggtaactaacctacagaaacacattttctcacaattctgaagtttgtcagtctgagatcaaggtgccatcagggttggctcccagtgaggcctctctgcctggcttgcagactgccgccttctcactgtgtcctcacacggcttttcccagtggagacagagcaagatctcaggtgtctcttcctctttttatggggacactcaccaatcctatcagattaggacctcaccctatgacctagtttaaccttaattacttccctaaaaacccagtctccaaacacaatcacacagggggttagttagggcttcaccataagaattttgggatgacacagttcagtctataacaaagacctttattaaaagcaagatcttggatctttcttcccaagtagacagtgaaatacgttaacacacgtaagcctagagcctggagttctggaagtgactgaggttctatccagtggatgaccaaagagagttagatttggaattcagtcaagtggggaaaaaacataactccgttttgctaacatgggtcctggtagagggggcatgatgccggagctagtagcagctccctgatttggcaggcggcttcccaactcagcagcttcctgcagcacttatggtagctttcctggtcctggccaaggtgacatggttctcaaaccagtgacacttggtggaagcatttattcttattcattcatttgtttattcactcggtgtcacatatttgttgaaagaatgaacagaggaatgaatgagtggcctatatcagaacgtagaaagctcccaaagcaggagcttcctgatttcttggtttcctgtgccggtagtaaaagctattctcctaatcagggcagaggcagagtgactttgggagctgggagttgtttcaagagccaagtctggatcttgcattttcagcccttccacactgttgcaagcactgaggaccaacactagctgaggtgactctagttgcctgtcactgaatacagttagcttcttgcagagggaggtaagaaagaggtttttggctagagcccaactaagaagactgttccctagaaatcatgtgttgtatattataatttaataatcattcaaattcaaaagatagtagcactctgaatttgatcatttacaaccagacaacatcctcgctgtaagccttttttttagatgtaagagtccccaggatatggactgaatgcatgtctcaccttctccaaacttcatatgttgaatcactaaccctcagtgtggctacatttggaggtgggaccttgagggggtaattaaggttaaatgatgtaatcagggtggggctctaatccaataggattagtgtccttataagaaggaacaccagccctccctggcatccccctgtcccatgcatgcactgaggaaaggccatgtgagcacacaggaggacagcgccatctgcaacccaacaggagagccagacaccaagcctgctggtacttgatctaggatttccagtctccagaactaaatttctgtcacttaagccacccagtctatgatgttttgtatggcagcctgagcagactgatgtatgccaccactgtttgacccccagagccgatggaatcatcttcttaagcatctcattcccatttttggggcttccttgctttccttgagatgcagcagctagaatggcatatcctgtctctagtgtgacctcaccaaacaggaacagctggataggtatttaataagactgttaagcagaaggcagctttctggagaagcttgttgtctatatacttcattatttaatgttgcttaatcagtaatgatacccagcattgcctctcaattttcctgtgggcggcaagccacccaggtaccgaggcaagagaccgaggacacgagctgttccagtataataaaatataaaataagaatagttataccagatatagatcttagatatgattatatatgaatatcgttaatcattagtttgtagcaattactcttattccaatattataataatccttgctctataatcataacctaggaaaaaccaggccatacagagacaggagctgaggagacatagtgagaagtgaccagaagacaagagtgtgagccttctgttatgcctggacagggccaccagagggctccttggtctagtggtaacatcagcatctgggaagacgcccgttgccaagaggactgtggtctagcggtagcgttagtgtcaaggaaaaacacctgctacttagcagactgggaaagggagtctccctttccccgggggagtttagagaagactctactcctccacctcttgtggaaggcctgacatgagtcaggcccacctgcagttatctggaggcctaaccgtctccctgtgatgctgtgcttcagtggtcaagctcctagtccgccttcatgttccatcttgtacacctggctctgccttttagttagcagtagcaaattagtgaaagtactaaaagtctctgataagcagaaataatagtgtaagctgtttctctccttctcctctctctctttgcctcagctgccaggcaggaaagggtccagtggacacatgacccatgtggcctcacctatcactggagatggctcacactccttatcctgcccctttgtcttgtatccaataaatatcagcgcagcctggcattcggggccactaccggtctccacgccttggtggtagtggtctgccaggtccagctgtcttttcttttatctctttgtcttgtgtctttatttctatgctctctcgtctctgcacatgaggagaaaacccaccaaccctgtggggctggaccctacattttccattcatttctgagttactagagccctcggctaagggctgagactgcagcactctgaagaagaaagagcaaaccagcctcacctgccatctgctttgttctgggctttgtgctgtgtgctctatttttgtatgcattgcccatttaactgtcccagctgctcagtgaggtgggatatgtatggatggtgttgggaaaaaagctcagtgttgggagagaagctgaggcagggcttgcatgtctgctacacttgctggctccttgcttctagcacttccattatctcaggcagccatatgtttctcattcacttgatatactgtttcctttcaacacccccctcccccatcctcaccacctgtttgtttgagcaccaataaatagcgtgggctcccagagctccaggcctttgcagcctccatactcgcgatagccccctggtcccactttttctcattcctttgactcctctggacttcatcaccccagtgacctggtgttgggtctgataaccccaacagatgggaaaatgaagaatttcaatatcaagttttctgtgctctgcctagcacttctgcttcccagcttgctctctctaacaccctgctcagagttttcctctgtgatgatgattgtgtgtcctgtgaccacaacattccctgttcccgttgccttcaggaatgcactgctctccacctctgaatttgatgctatggctctcataataatcatcttttgtgcaggcctcaacactattgccttttcttcctgttattttaatatgcccaccgaggggtagatccagttcactgcctgctccatcccagtacccagacagctgactatctatcacaatggccacacagtaaattcatgaccctgtacctcaagggaaccatgtgtactaccaggaggcatttctgcacttccttagtcctctcactctcccaactgcccaccttcatcctcctcaaatcccccaaatgcctccacaattctcgcagttgctttttatttcaatgagaaaacaaaagttatcctcagaagatggtgtcctcactctctcaccatcacaattctaacctggctacccaaatacgcaaatggtctgccttaggtaacagtcatgaatcatgtcgacttctctacttgttcattacctcaacctctcttccctactgaaggacgacacgccagcaattgtcccctctctcctccatcaccacgtcttcaatatccactgagtcaccccatcagcacataaatatgttgttatttcttctgtttaaaacaccttcccttgcactcaattccatcgcatttaatactccatttctttgtcatcctttgtagcaaagcttctcaaagttatttccaattttctcatcccactctccctcaagtccacttcaatctgtctttcacttcctctactcctccaaaaccgcacttgtcaaggtcgccaacaaccttacatggacaataaatatttggtgcataaattaataaaataaatacaaataaaattacaaagtggtaaatggatctaaacaatctttgcctaagtcgtgatttttctggaggccaggcttgatgaaatattaatgattactatcattagcacaataaaaattaccaaataaactactattttgcttagcagaaaggaattacactaaaaataaaatcaaatttctaggaagtcaatcactccagtgatttttgccaatcatcttaatgagtctattgatgtgctaacgaactcattcttaatttccgacagcttccaaaacatttttaatcactgaaaaagtgattcataggttagtctgcaaagagatgcatcaatatcaatcaccacaatacaggatttttaaacaaattactgctgaggcagctggcagacagcccatgggagaaatgtttgcactagccaggtgtatgataacttacattcatcgcagcccaagtctgttgcctctattgtctttcttctgggatctcagtaggactggtagtgatatcaaaacaggaagaaattgtaaactttcacacatctaacttttaaaagttggagattactctgaaataatgacctctgacactaaggtcaggatcaatacacgtttttaaagtatgttaagatggctacttgtcttattttttgttgctgttactttatccttattgacataacaaccagtactgaagtgatgtttgtgagcaaatgatatggattttagcatttcaattccgttgagttggagacagcagtccctccttcctcccgcaggcctgcaggggagtacaggatgatgttacgaggtcacctaggtcgattcagaccgtcagcatcaatacaccctgcctgctgcagacacgctcccactgtgtgaagagctctgcccagggtcattgcacagggtcagcaaacggcaagtcctgttggttcatccttgaatggctttataagatgagaagattctatattcacaaaattctgaatccccataagtatgtcaaagacgaagttactctcactctaaatttagttatagatcaaattggcttttattcatgattaatgaatctgggctgtctccattctacaaattagaatgagcgcccccactgggcaatgccggaaaagtaggttttgcaagatagggacaaggaaacagaacagtagagaaaaactgactggttaacttgtttacttctattgtaagagttaaagcagaaggggtttccttattagtggactcaggtagactggactcctgacttcaggggaaaccggtttgttcagggacccatttgcttccttaaagtttccattttattgtgtgcgtttagcatgagtgcctatattttggcttggcctggtttcttgggcctagtgcataggcccaacataggcatttcttcaccaggggttctcaaacttggaattgtaccagtgagccatgggccctagtctctttaaagattaaatgataaaaaagggagcatctttcgtgtctcagctgcctgtattgagataatcaagataaaagaaaaataattaaggataaaagaagatgcatagtatgtcccacaggccggcgagtccacacctgttcatttgaatactttattcaaactcccctaagtgaaaatgtctcccatctgtttagcattctttagcttcagaattctcccaaattatttccttttttatgaggctaaagttttgcctgttgactgtctggtgtgaattacatcccaatcaatggaaggaagaagaaacagaagacgcttccatttgctagtaaacatctgtgctgaaaaatagcatatttatttcttccaagtgaagcaaataatctattttgtggttgaagtgttttattattttcatacactttctacattgccttgttttctcattagggttggatgctcaaaagatttttgtaatattcaaattttgtatggaccttgagtgataagcaatattagacatggcaaataaataatttcatttctagttttttgacttcttatccaattttattaagtacctgttatgaacagagacactattttttttaaatcgaaagaggattttataaatgaagtagatgatataacccctgcgtttaaggagttacgatctatttacattcactaaagaagaaaatcataatgctcagtgggtatgccaacaagataaataatgttctataatgttctattgtcttttaaataaagaaaatcactggctcagttgactttaaggtctacacagcaatcaactgagatttcttggagctgagtccacactcagtgtggaaatttcctacaagaaagatgagcacttctccaagtcctggatggattataagttacaaagctaagcattgcaactgataaaacctaagagaaaataatattatttgaggacttactatgggccaaatgctatgctgaagagcttcacgtgtatccacatatttaatcatcccaccctccctatgaggtaagtactcgtattctgcccattttgcagatgagaagactgattcatagaataattaggtaacttgctcaagaacattcagctactaagtggcagaacaaggatttaaactgtctgtctgactccaagcctgatgcgattactatattcattgacagatggacaagtaagggcatccagtccacgttaaaatgttcactttgcttagtttggaacgcagggcgatactggttaagtgggactactgttcctatacgggctgaacagaaaaaaggcctccaagttattccattctatcctctatacactatgtgaaaagaaagatccattttaattgcatctgcagccgctaccagcaaacctgtgcctgatggtgggtctgcaccttacactgtatacatacatataaaagcatgttgtttctttggtcaattaagccaaaataccagttccctcagaaaataacattcagtctggctgtttggcgttacgtagacacaatgtctcaagcagtttgtgttaacatgatgtgacttgccggctgtcttgagtagcattgtataattgctcctcttcacctgccaatacgtgcaggaacatgacaacagcctagcccagattccagtgggtgaacaaagatcaaacaagattggacataaattgatcattgttgaagctgcatgatgcatgcatgtaggtcaattataccattttccaccttgcattgcccataataaaatatttttaaagttttcaaatttaaaactttatatctagagagtttcaggatatttaacaaatgtccctgattctataatgcaattgtttctatcattataactctttacacttccctaggaaaagtgttatattaatgctatggttagcagtttgtattagtaactataatattacaggtaagttaaatattaaattaactatgtgctttaagaagcactgtagatatatatggcaaatcactctcaacaaaactagtgatgacctgtaaaattgtttcctcctgtaaaactgtttccattcacctttctactttcttggcctcttttctttggtttaaatgtcttgcttatgtctgctacataaactttgaaggttaagagaaaatttgtcaaagtggaaatttaaaaacaagcaaaacctgctattgttcaatgatcctcaaaacaaaactcaattgaatatttcatatttttcggaggagcttggctcacaaaacactaatttattttaaaaactctcagtcatcatattctctgatgaaggtgatgatggtggggggagatggcagaactgtagattgttttattgctgcatttactcaatatcttcttaaaaaacaaaacaagacaaaaacatgtaaatgtcaataaacttaaaggagaagtttactagaaataactttagaaaggataacgcagtgaactgtggctaatggtttgaacaacattttgtagttttagtttgagagagccactaaaatatagcatcttctattgaaatagtaattcaattagatctggataagatgattcaaatgacatttaaaaaataatgtattcggccgggcacggtggcttatgcctgtaatcccagcactttgggaggcggaagcaggcagatcacaaggtcaggagttcgagaccagcctggccaacatggtgaaaccccgtctctactaaaaatacaaaaattagccaggcctggtaccgggtgcctgtagtcccagctactcggaaggctgaggcaggagaatcgcttgaacccgggaggcagaggttgccatgagccgagatcacgccactgcactccagcctgggcaaccgagcaagattccatttcaaaatgatgatgatgatgataataataataataataataataataataataataataatgtatttgttggagtaaaactcataattccattgcttttgcaagatagttctgtcagagtcacagttttattatagtcaggctagaagggagaaggccttctcatcattgacctgtagttatttaattaatcatttttaaaaatgagatgaaaaaccacaatgagataccatctcacaccagttagaatggcgatcattaaaaagtcaggaaacagatgctggagaggatgtggagaaataggaatgcttttacactgttggtgggagtgtaaattagttcaaccattgtggaagacagtgtggcaattcctcaaggatctagaaccagaaataccacttgacccagcaatccccttactgggtatatacccaaaggattataaatcatcctactataaagacacatgcacacgtatgtttactgcagcactgttcacaatagcaaagacttggaaccaaaccaaatgcctatcaatgatagactggataaagcaaatatggcacatatacaccatggaatactatgcagccataaaaaggatgaattcatgtcctttacagggacatggatgaagctggaaaccatcattttcagcaaactaacacaggaacagaaaaccaaacactgcatgttttcattcacaagtgttcataagtgggagttgaacaacaagaacacatggacacagggaggggaacatcacacaccagggcctgtcagggggtgggggactaagggagggatagcattaggagaaacacctaatgtagatgacaggtggatgggtgcagcaaaacaccattgcacaggtacacctatgtaacaagcctgcacgttctgcacatgtatcccagaagttaaagtataatataaataaataaacaaataaaatgagcattaaggaacttacagctcaaaacaaaatgtaggtcccttacaacgacttatgtcaaaatgtatgatacccctatcaacccactcaaggtaaccaacatcctaatcctagattcataattccccggcttttcttttgagttttatctatgcatgtgcataagtaaattctcttgaaatcttgattgtttgtaagttttattaaagtgccaaatgcaattttttggaacttcacttttctctttaaatatagtattgttaaaattcatcctgttgttgtttctgtggttcatttgcttgtatagtaatatgacattcatcatgtgaacagaccatgaattattcacccacacttctttaatgggcaatgagttgtttacaagaatttgctcattgtgaatggagctgctttaaacactcttggccaggtctcctgttgcatgagcagtctgtacctgaaacgttgctggtcaccatgtcagaaggaaagagagcatgtgaataacacaccggccagtacacagcctccactcgggagtgacgcgcatgtgaataacacaccggccagtacacagcatccactcgggagtgacgcgcatggtgaataacacaccggccagtacacagcatccactcgggagtgacgcgcatggtgaataacacaccggccagtacacagcatccactcgggagtgacgcgcatggtgaataacacaccggccagtacacagcatccactcgggagtgacgcgcatggtgaataacacaccggccagtacacagcatccactcgggagtgacgcgcatggtgaataacacaccggccagtacacagcatccactcgggagtgacgcgcatggtgaataacacaccggccagtacacagcatccactcgggagtgacgcgcatggtgaataacacaccggccagtacacagcatccactcgggagtgacgcgcatggtgaataacacaccggccagtacacagcatccactcgggagtgaggcgcatggtgaataacacaccggccagtacacagcatccactcgggagtgaggcgcatggtgaataacacaccggccagtacacagcatccactcgggagtgacgcgcatggtgaataacacaccggccagtacacagcatccactcgggagtgacgtgcatggtgaataacacacgggccagtacacagcatccactcgggagtgacgcgcgtgtgaataacacaccggccagtacacagcatccactcaggactgacgcgcgtggtgaataacacaccggccagtacacagcatccactcaggagtgacgtgcatgtgaataacacacgggccagtacacagcatccactcaggagtgacgcgcatgtgaataacacaccggccagtacacagcatccactcaggactgacgcgcgtggtgaataacacaccggccagtacacagcatccactcaggagtgacgcgcatgtgaataacacaccagccagtacacagcaaccactcaggactgacgcgcgtggtgaataacacaccggccagtacacagcatccactcaggagtgacgcgcatgtgaataacacactggccagtacacagcatccactcgggagtgacgcgcatggtgaatagcacactggccagtacacagcatccactcgggagtgacgcgcgtgtgaataacacacgggccagtacacagcatccactcaggagtgacgcaagtcacttttgcttatagagcaagtcacaggctagacctcaattcaaggagagtgtgtgtggaagtgtagtctcttcatgagcttaatggtagaaatggaaatagttggtggacagcagtcataccgccacagcatctattaagctccagcctctgtgccagaccctgttataggtgctgagaatacagggtgaatacaatagacaaagtatttatcttcacgaagatgatattctcactggggagagacagcaaataagcattgcagaacggcctgaagtttcagaatgggttgtaaccttagaacattgcctgctatccaaatctccttggaacaaatccacctagcaccaggaatcaatttaatcgtggctctagaattcacaacaaaatcgaataatacagttgaagtgacttcgtttggattttacagaccaacttcatggcagagttgactgaaataaatgtccagaacgtttttaattggacttcgagttcatatacatggtgcatacaggggcaacatattctccctttgtttagagcagagtttcctgcatgaaccagcatgcaggaaactatcacttgtgaatctatcactctacatgggtttctgatctgagttctttgggaaagcaatagctgtcacttcttgtaaagtgctgccgatacaggtgggaattgtatttcactgcatctcatttgaatcagaagtacaagggcaaaaatcacgggatctttattcattgacagtaccgtcaatcccaattaatcaacacctggaggattctccaataacacaagtgtgctgaattcagttcctatgtactctaataatagtctcatttatattctgagtgcatgattagtgattctgcattgctagatttcattaagagatacatgggagggagtttttgaaaaaaagatcatctgtttgttgcaaaataaaaaaaaatataacttgaattgagtatattctcattaatcgttagcaatcaaatgacctgagctttcccctaaactacacaagctaataactgacattaccatggacataagcagaaacataacagcatggtgccagccatgactgtttctgttaaagcataaacaccaaaataacagaaagcctctgtaacctaataactagacatggtatccttagaactctcataaataatatataaaagtctagtgattcatgaatttgggaaacaaagctctatgcgggccagcttcccatctagccggagaccactgcctcatcagagttaggatggaatactgcctagcttggcagctggctctaaatgactgtgcgatgcgttagactccttacataattaaaaattatgtaaggagtctaaattctgcttagttcttatataagcagaatctgtacggcaaaagagaagaacaaattttttttttgagacgaacaaattttttttcctacataattaaaaactatgtaggagtctaaattctgcttagctcttacataagcagaatctgtatggcaaaagagaagaacaaattttttttttgagacggagttttgctcttgtggcccaggctggagtgcaatggtgtgatcttggctcactgcaacctccacctcctgggctcaagcgattctcctgcctcatcctcctgagtagcttggattacaggcatgcaccaccatgcctggctaattttgtatttttagtagagatggagtttctccatgttagtcaggctggtctcgaactcccaacctcaggtgatccgcctaccttggcctcccaaagtgctgggattacaggcgtaagccactgcgtctggccaaaactttttaaaaataattagtctgaattaaatataccaagaagcaaatgctggcaatttttttggctttcggggatagtttatttctattcatttttaacaatctttaacaggcttcactaccttctagctccaggcacttattctttgatctcttcagcaacatcctaatgagtctcctggcttcctcacttaactcacaacccaacccattctccacagagcagccagagtaaactctttaaaaatatgtaaatcatattaaatcaatccctccctaaaatctttcatgcctttgtcatcagagagatcaaaaacctcaatctcctttccataactgacaagtccctgcaaacagcggactgcatatcccatctcatctctatgcttttcctctcactcgtctctctgcttttcctctcactcctctttattcttttcctctcaccgcatactgttttgggtagcagtggttcattcattttcaagctataagttggttcattttataaacacacaaaacatgaatgagctgttcaactgctgatggacatttcaggtgtttccaatgttggcaaccatgaataatgctgctgcacacattctcgtatgtaggtacacatatttgtgcatttcttttgggaatatagcaaggagtaaaattgctagcttaaagggaaagtttttattcagctttattagacagtactgaatagttttgcaaaatggttgtaccagttgacacccaaacaagagagaatgagagttaactgtacgttctctccagcattaactgttgttagtcttggggttttaagcgggctgttgttgtagctcattgccgctctctccctacgggaatttgctgttattgttgttgttgatgtataattatattcagtttgtggcttgcttttttattgtgtgttccttgaaagaagttttaattttgattaaatgtagttgtttttttctttcatgatttgttctgagttctctctaggaaaacttcgcataaccacaggttgcaaagatattctgtatttttccaggagctttgtagtttcagcttttcaatttaaaaatgtaacatgtttcaagtaaatttttatacatggcataatatatggaccaattttcaatcattttaatatagatatttaattgactatgtgctttcggctgaaagttttcctcaacttattgaattattttgtcgcagccgagcacagcggctcgcacataaaactgcagcactttgggaggcaaaggcaagagcatcactttagctcagaagttcaaaaccagttctggcaacttggcaaaaccttgtctctacaaaaaataccaaaattaactgggtgtggtggcatgcacctgtagtcccagctactcaggaggctgaggtgggaggatcacctgagccagggaggttgaggctgcagtgagccacgatcatgccaccacactccagcctaggtaatagagtgagactctgtctcgaaaaataaaaattaaaaaataaattattttgttgcatttttttgaaagttgattgaccatgtattgtggagctatatctgaaatctccattctgctctgttgatcagtctgtctatccacatgttgatttcacatctcatgacagctctataatgtgctttaaagtcaggtggagtatgctatccaattttgttattctttttgaaattgttttgcctattctgagtcctttacattccatatatatgtcagaatcaacttatcaatatatactccccctcaaaaaaaattctaaccttgctgcaactttgaaattcaattgcatttatggacgaattgggaaaaattaatgactttacaactatgaggattatatatctctccacgtacttaggtctttcttgttttctattttttgatatttattttattggaactgatctctataaatttgtctgtatatagaaatacagaaaatttatatatatatatatacctcatatcctgaagtcatgttgatttcaacttatccaatttagtataaatgcagatttttttcttagatttctgtgagttttctatataaaatcatgttatttgcaaatatagttttacttcttcatttccaatatttcttctcttttatttttgtcttttttttccttattgcattggattagatatttagtagaataattaatgcaagtggtgagaggggacatattcgctttgattctcatttcgggggaaatgagttcagtattttaccattaagtgtaatgttagttgtaagatttgcacagataccctcttttttttgtcatcatgaatgaatgttggattttgttaaatgttttttctgaatcttgagatgatcatctgagttttcttctttaaattatattgattttttttcaaactttaacataatagtttcgggataaacctcactttgtgatgatacattatttttctataacattagatttaatttaccaaaattttgttctagatttttgcattcatgttaatgagggatgctggtgcgtgtgttcttgtcagaagctcttgtcagaggtttgtattagggttttctaaaagcttttttatgatttgaattatttcttccttaaatgtttcataagaattcatccatgaagcagtctgggatgatgtcgaccagggatagaaaggaaaactgtgcctgtttttaaatgagcctccttattgccaaacagccagctcctgtgctttctccacagcctggctcagttccacagaccaccctgggccacctctgccttcagggcctctttgacttcctccagtcctcatgtgaaatatgtatttgttgccatcgttcctccttttgtttgccattttcctcataatttattgtgtggtttatgttttattagtattctcccccttcccacgtacatcagtgtgtcctagaacaggttctaccctataagcttccatgtttctaactctcggtggggtaacatacacacaggtagtctcagaaaatgactttggaagaggttaagagtgacggagattataaccagtaatatgagttcatattaccagtttacagcacaaatgcagagaaaacttatttttgcttgtttctgattccagctcccaaatactacatacacacacacacacacacacacacacacacacacacacgcacacatatgctcttcctctccgaagccttactcttaaccacacaaattgttcaatagcccctaagggttatttaggcctaaaatatcaatgctgagtttcaatgctagacagagagaaaaacagataaatctgatttgtctaattgcacagttactttttttaacttttatttccagttcagggatacacgtgcaggtttgttacacaggtaaacttgtgtcatgggggtttgttgtacagattatttcatcacccaggtattaagcctagtacccattagttatttttcatgatcctctccctcctccctccctccaccctccaaaaggccccaatgtgtgttgttcccctctgtgtccatgtgttctcatcatttagttcccccttataaatgagaatatgcagcatttggttttctattcctgtaattgcacagttacttggttgctttaattgttaagagaaccgccttagcgtcagatggacacatctccatttccctggtccttgctggcctggctccccccagcattgcagtcatgccccatggttggcttcaaagtcagggctcatgtgctcacatgcccagcatttgttcctcatacatagtgtttatggcagcatctgagagagcttcctgtctcagcgcaggctgtgccagaactagacctcccacagaaccctcgacctatgctaaggccaacaaactcttccctcctcgtatgttccctttaggctttgctgaacctgatgtcctttttttaatttttatttattttttgagacagagtctcactctgctgctcaggctggagtgcggtggtgcagttatggctcactgcaacctcaacctcctgggctcaagcgattctcccacctcggccttccaagtagctggggctatagccatttgtgtagagacggagtcttgctatgttgtcaagctggtctcgaactcctggcctcaagcaatcctccagcctcagcctcccaaagcactgggattacaggagtgagccaccatgatgttcttttctctgagccgatcttggcaaatgcctctgtgattcacgtagatttttctaactttcactctcagggttacgtatttcactctccctccagctcccagtacagatatacaaaatcactgttgaaaagaaataaaatgaatctgtaaagccaagacttcagcgtaagttgaaagaaaaaaatgtgtcaatcaagggagcgcatgtgtaaataacagccagaacatctgccctgctccaataaaacaaggccattcgcaggtttatttctagactggcgacagatgtcgaaaactgttgcggtgccgtggtgccagccgaagacccacctaacaaaccagctcctgtgctccgctaagaaaattcacataataactaagagctccactgtatctttttctccagggaaagaaaacattgatcagtgatcacaagtcccctgttgacctgggggttgtacttctcattggagtggaaggaaccacctttctgattttcatatctcaattctatgaggtgattatatccactgagtacagctctgatctctgtgctgtcagatcaggttctcgatcctgcattctggaaaacccaaacctggtctgggttgaatttgccaaggtaaagccaatcagctttttccaagtgatatttagctttcttacaagcaccctttcttcagactgcaacacacacacacacagcacacacacacaccacacattggtcacaattggagaatgcaaaactcaatattttgaaaacttataaataaaagaaaacattcaagcatttattatgtcattttttaccaacaattttagggagtaaccaaatacgagatgagaagaatatatgaaaacaaacaataaaattgaatatagtaatttagcaacttctcatgaattaatgaatgacactgatatttagatggctactgacacaattttaaaaaagataaccagaaatacatgattcctgatgagaaatacataacttcagaaatagtcttgtcctcccaaaattaaataaaccaatcaagcaaaatcatatcaagcctttatattcaactaccaatttatttaaaaaataccgaagatggaggaagacattgtaaagcagaccaggatgtaatctggaaaatccacactgtgattgtcaaaagttctatagaaaagataatccattttcttcaataaataaattgtaagagaaaaagaagatggatgagaatctagagagcaaaataaatgtaaaccaagtctttttttttttttttttttttagacggagtctcgctctgtcaccagactggagtgcagtggcaagatcttggctcactgcagcctccacctcccaggttcaagcaattcccctgcctcagcctcccaagcagctaggactacaggcgcgtgacaccacgcctggctaattttttgtattttagtagagatggggtttcaccgtgttggccaggatggtctcaatctcctgacctcacgatctgccagcctcagcccccgaaagtgctgggattacaggcatgagccaccacgccaagtccaatgttagctgtgtcttaaccaatcataccaggagacacattggatcctgattggaacaaattattttttaaatgacatttataagatgacagaaaattttaatatgcacatgatattttataagttaagaaattgctaaatttttatatgagatagtcatttggtggttgttttatttagagttcttagcttctcgagatatcctaaaaattttcaggataaaactacataatgtccacggcttgcttactatgggggccaggaactggtgggatgtagatgaagcaggatcatcttcaactgatgattttggaacctgggtgatggaaacacaggtgttggtacactatgaagtcaaatttacacatattcgaaatgattattcaatatgaaaattgaaaatgctatttttcataataaaaagcttataagttcacaataatagcagcaatctggaaatcctcaggtgatatttgtcacagaataattgattcaaggtagaacttgtcggaccccgtgctgtgctgtgtatgaacaaaagcagagttcattttgtagttgtcagattctttttataacctcaggaaaaaaaaagtagataacaggactgaaatatagtggtgttacactgagaaccattgaattttaaaggtagtaaagaaaatattaatgacagttttaagaaattctatacaccatatgctaataagttgtttttatgcgttttctagggtggtaattcaagcaaaatttgttaacatgaatgaagactataatttttgccatgtacgcacaaacatcttacatatcaaggagaaatatagcaataagaagacattaaaacagcacagaaaagctttcaaatttattgtttattgggtacaaagaggtataatttaaaatatatttccagattcccgaaatacatcaccataactgagttaactaatacactctcctttggccaatgatatgtattacccgaaaagatcatagaaaggagacttttaagagacagatcatcatggcggacgggaggcaggactacattgcagctccctcagggcagcgtgcggggctcgcattgtgacttttagctccagatggactgcaggaagaaaccagcagtcccgagaggacccgcagaccctctgaaggaagtgggctgctcctgcaggacccgggagacccccgcaaaagtgtgagtgccccaactgcagaagtgggagagggagaccctcctctcccaaacacacacccccactggggaagctgaaggtctgtttgcgggagaatttccaactttacctggagctgagtccgtctggggagcccagtgaggtacaggggtagaggaagcagcggaaaggcccgcggagctcgctgggtccccgagcagcccattcctgctggcaccacagggatccatcgggagaggagggggtaaaactccacagggagaaggaaatctctagctgagcgttgtaacaatttgaactgggtgagaatcctcctggccagaactagggcagggcacgaatccggggtgcagactccacaggcgggggaagaaccaagcctttttctctcgcagctgggaggcgggtagcctggggcaggttttcaggcctgtatccctctccgcctggaaacggactgggggctgttggggggtgcacggtgggagtgagaccggccctttggtttgggtgggagctgggcgagccctgtgactgccggctttcccccacttccctgacaacctgcatgactcagcagaggcagacataatcctcccaggtacataactccagtgacctgggaatctcacccccagcccccacagcagccgcagcaaggaccgcccaaggagagcctgagctcagaggtgcctaccccaccctcacctgagggtccttccctacccaccctggtagcagaagacaaagggcatatcatcttggagttctagggccccgcccaccgccggttcctcgccacaccaccacagctgatgctctctggaaagtgccacttcccggcaggaggccaaacagcacaaaaatagagcgctaaaccctcacagagtccattgcactctccctgcctcccatcgccacctccaccagaacaggtgctggcatccatggctgagagacccatagacggttcacatcacaggactctgtgcagacaacccccagtaccagcctagagccgggtagactcactgggcggctagacccagaagagagacaacaatcactgcagtttggctcacaggaagccagatccataggaaaagggggagagtattacatcaaaggaaaacctcgtgggacaaaagaatctgaacaacagccaaatgagaaggaaccagaaaaccaattctggtaatttgacaaaacaaggctcttcaacactcccaaaatcacaccagttcaccagcaatagatccaaaccaagaagaaatccctaatttacctgaaaaagcattcaaaaggttagttattaaccgaatcagggagggaccagagacaggcaaagcccaacgcaaggaaatcaaaaatatgacacaagaagtgaagggagaaatattcaaggaaatagatggcttaaagaaaaaactaaatcaaaaattcaagaaactttggacacacttttagaaatgtgaaatgctctggaaagtctcagcaatagaattgaacaagtagaagaaagaaattcagagttcaaagacaaggtctttgaattaacccaatccaacaaagacaaagaaaaaaagaataagaaaatatgaacaaagcctccaagaagtctgggattatgttaaacaaccaaatctaagaataatctctgttcctgaggaaaaaaattctaaaagcttgcaaaacatatttggaggaagagtcgaggaaaacttccccagccttgctatacacctagacatccaaatccaagaagcacaaagaacacctgggtaattcatcgcaaaaagatctttgcctaggcgcatcgtcatcaggttatccaaagttaagatgaaggaaagattcttaggagctgtgagacagaagcaccaggtaacctataaaggaaaacctatcagatttctcagcagagatcctacaagctagaagggtctggggccctatcttcggcctcctcaaacaaagcaattaatagccaagaattttgtatccagcgaaactaagcatcatatatgaaggaaagaaacagtctttttcagacaaacaaatgctgagaaaattcaccattaccaagccaccactacaagaactgctaaaaggagctctaaatcttgaaacaaatcctggaaacacatcaaaatgaacctctttaaagcatacatcacacaggacctataaaacaaaaataaaagttaaaaaacaaaaacaaaaaaaccctaagtacacaggcaacaaagagcatgatgaatgcaatggtacttcacatttcaatactaacattgcatgtaaatggcctaaatgctccacttaaaacatacagaaccgcagaatgcgtaagaactaaccaaccaactagctgctgctttcaggagactcacctaacacataaggactcacatacacttgaagtaaaggggtgggaaaaggcattttatgcaaatggacaccaaagacgagcaggggtggctattcttatatcagacaaaacaaacattaaagcaacagcagttaaaagagacaaagagggacattatataatgataaaaggtctcgtccaaaagaaaaagatcacaatcctacacatatatgcacctaatgctggagctcccaaatttataaaataattactactagacctaagaatgagatagacagcaacacaatagtagtggggaacttcagtactccactgacagcactagacaggtcatcaagacagaatgttaacaaagaaacaagggatttaaactataccttggaacaaatggacttgacatatatatacagaacatttcatccaacaaccacagaatacgcattctatttaacagcacatggaactttctccaagatagaccacatgataggccacaaaacgagccaaaataaatttaagaaaattgaaattatatcaaacactctctcagaccacagtggaataaaactggaaatcaactctaataggaaccttcaaaaccatgcaaatacctgaaaattaaataacctgctcctgaatgagcattggatcaaaaatgaaattgacatggaaattaaaaaatcgtttgaaccaaacaacaatgacacaacttatcaaaacctttggcatacagcaaaggtggtgctaagaggaaagttcatagccctaaacacctacatcaaaaagactgaaagagcacaaactgacactctcaggtcacacctcaaggaactagagaaacaagagcaagctaaacccaaacacagcagaaggaaggaagtaaccaagatcagagcagaactaaatgaaactgaaacaaacaacaaacaatacaaaagataaatgaaacaagaagctggttctttgaaaagataaataaaattgatagacctttagaaagattaaccaagaaaagaagagaaaaaatctaaataacctcactaagaaacgaaacaggagatattacaactgacaccactgaaatacaaaagatcattcaaggctactatgaacacctttacatacataaactggaaaacctagaagagatggataaattcctggaaaagaatacaaccctcctagcttaaaatcaggaatattagatacctaaacagatcaataacaaacagtgagattgaaatggtaatttacaaattaccaacgaagaaggtccaggaccagagtcacagcagaattctaccagacattcaaagaagaattgataccaatccttttgacactattccacgagatagagaaagaaggaaccctccctaattcattctatgaaaccagcatcaccctaatagcaaaaccaggaaaggacataaccaaaaatgaaaactacagaccaatatttttgatgaacatagatgctaaaatccttaacaaaatactagctaaccaaatccaacaacatatcaaaaaaaataatccaccatggtcaggtaggtttcatatcagggatgcagggatggtttaacatatacaagtcaataaatgtgatacactacataaacagaattaaaaacaaaaatcacataatcatctcaacagaggcagaaaaaagcatttgacaaaatccaacatacatttatgataaaaactctcagtaaaatcagcatacaaggaacataccttaatgtaatagaagccatctataacaaacccacagccaacataatactgaatggggaaaagttgaaagcattccctttgagaactggaacaagacaaggatgcccactctcaccactcctcttcctcacagtattggaagtcctatccagagcagtcagacaagagaaagaaataaagggcatctaaatcggtaaagaggaagtcaaactgtcactgtttgctgacgactttatcattgacctcaaaaaccctcaaggctcctccagaaagctcctagaactgataaaagaattcagcaaagtttccagataggagattaatgtacacaaatcagtagctcttctatacaccaacagcgaccaagtggagaatcaaatcaagaactcaaccccttttacaatagctgcaaaaaagttaaaatacttaggaatatacctaaccaaggagttgaaagacatctacaaggaaaactacaaaacactgctgaaagaaatcatagatgacacaaacaaatggaaacacatcccatgttcatggatgggtagaatcaatattgtgaaaatgaccatactgccaaaagcaacctacaaattcaatgcaacccccatcaaataccaccatcattcttcacagaattagaaaaaacaattccaaaattcatatggaaccataaaagagcccacatagccaaagcaagactaagcaaaaagaataaatctggaggcatcacactacctgatttcaaactatactataaggccatagtcaacaaaacagcatggtagtggtataaaaataggcacatacactaatggaacagaatagagaacccagaaataaactgaaatacttacagccaactgatctttgacaaagcaaacaaaaacgtaaagtgggaaaggacacccttttcaaaaaatggtgctggcataattggctagccacatgtaggagaaagaaactggatcctcatctctcactttacactaaaatcaactcaagatggattatggattaaggacttaaacctaagacctgaaactgtaaaaattctagaagataacattggaaaaacccttctagacgttggcctaggcaaggatttcatgaccaagaacccaaaagcaaatgcaataaaaacaaagataaatagctggaacctaattaaactaaggtgcttttgtatggcaaaaggaacagtcagcagagtaaacagacaacccacagagtgggagaaaatcttcatagtctatacatctgacaaagaactaatatccagaatctacaatgaactcaaacaaatcagtaagaaacaaacaaacaatctcatcaaaaagtgggctaaggacatgaatagacaattctcaaaagaagatatacgaatggccaacgaacataggaaaaaatgctcaacaactaataatcagggaaatgcgaatcaaaaccacaatgtgataccaccttactcctgcaagaatggccataatcaaaaaataaaaaaacagtagatgttgatgtggatgcagttaacagggaacacttctacactgctggtgggaatgcaaacagccactatggaaaacagtgtggagattccttaaagaactaaaagtagaactaccattggatccagcaattccactactgggtatctacccaaaggaaaagaagtcattatacgaaaaagatacttgcacatgcatgtttatagtggcacaattcacaatcgcaaaatcgtgaaaccaacccaaatgcccattgatcaatgactggataaagaaactgtgagatagatatatatatgtgtatatatatatatatgatggaatactatgcagccataaaagggaatgaattaacagcatttgcagtgacctggatgagattggagactattattctaagtgatgtaactcaggaatggaaaaccaaacattgtgtgttctcactgatatgtgggagctaagatatgaggatgcaaaggcataaaaatgatacaatggactttggggacttggggggaagagagggaggggggtaagggataaaagcctacaaatatggtgcagtgtatactgctgaggtgatgggtgcaccaggatctcacaaatcatcactaaagaacttacccatgtaaccaaataccacctgtaccccaataacttatggaaaaatataaaaaaagaaaggagatctttatatttaagtatgtgtagtgtatatatctatatctgcatatatatatatatctgcctctttatctatatatatttagccatatatatatatatataaataaatagatcataaaagtaaagggtatatatttacttgcactttctatgattttagcaaaatatataacattgatatatgattaggctgatgctattattttaaaagaatcatggaggaagtaaaagtaaaaccaaaaactatataatcatctcaatagatgcagaaaaagcttttgataaaatccaacatcccttcatgataaaaaccctcaacagactaggcattgaaggaacgtacctcaaaataataagcaccatctgtgacaaaaccacagccaacatcatactgagtgggcaaaagctggaagcatttcccttgagaaccagaacaagacaaggatgcctgctctcaccagtcctattcggcacagtactggaagtcctagcaagagcaatcaggcaagagaaagaaatgaagggcatcagaaaggaagaaatcaaactatttctctttgctgatgatatgattctatacctggaaaatcctaaatactctgccaaaaggctcctggaacaatcagcaacttcagtaaagtttcaggatacaaaatcagtgtgcaaaaatcagtagtatttctattcaccaataacattcaagctgggagccaaatgaaaaacacaatccaatttacaatagtagcataaaaaattaaatacctagggatacagctaaccaaggaggtgaaagagctgtacaaggagaactacaaaacactgctgaaaaaaatcagagatgacacaaatgaaaaaatattccatgctcatggattggaatcattaatatcattaaaatggccatcctgcccaaagcaatgtacagattaaacactattcctaacaaactaccaacatcattttttcacagaattagaaaaaactattctaaaattcatatggaaccaaaaagagcccaaataaacaagcgatcctaagcaaaaagaacaaagccagaaacatcttattacccagcttcaaaatagactacaagcctacagcaaccaaaaaagcgtgatactagtacaaaaaagacatgtagatcattggaacagagcagagaatccagaaataaagccaaacacctacaaccgtctgatctttgacaaacttgacaaaaataagcaatggggaaaagactctctattcaataaatagtgttggggtagctggctagccatatgcaaaagattgaaactggagccctacctatcagcacatagaaacattaactcaagatggaatagagacttaaatgttagacctcaagctataaaaatcctagaaaaaaatccaggaaaaacccttcttgaaatcggccttggcaaataatttatggctaagccttgaagacctatcccaacaaaaacaaaaattgataatcgggacttaattacactaaagagcttctgcatagcaagagaaactatcaagtgattaaacagacaacctgtgggagaaaatattcgcaaactatgcatgtgacaaaggtcaaatatcccaaatctataaggaatgtaaatcaacaaccaaaaaaaacaaataaccccattaaaaagtgggcaaaggacatgaacagacacttctcaaaagaagacatacaagcagccaacaaacatgaaaaaatgctgaacatcactgatcatcagaaaaatgcaaatcaaaaccacagtaagacaccatctcacaccagtcagaatggcttttgttaaaaactcaaaaaataacagacgttggcaaggctgcagaaaaaaggatacatttatacactgttggtgggagtgtaaattagtccagccactggtagagagcagtttggagatttctcaaagaactaacagctgaactaccatttgacctggccatctcattcctgggtatatgcaaagaaaaatcaatcattctaccataaggacacatgtgtgttcatcacagtgctattcacaatggcaaaaacacgaaatcaacctatgtgcctatcgacagtggactggataaggaaaatgtggagcatatccaccatagaatgctgtgcagccataacaatgaggaaatcatgtcctttgcagcatcatggatgcagctggaggccattatcctaagcaaactaactcaggaacagaaagcaaataccgcatgttcccacttacaggtgggagctaaacactgaatccacacggacacaaggatggcaacaattgacactggaggctactggggctggaggcgagtaagggctaaactacctactggggacgatgtccactacctgggtgatggattcagtcataccccaaacctcagcataatgcaagatacctttgtaacaaacctgcccatgttcctcctttttctaaaataaaagttttcaaaaaataaaattatgaggccaggcatggtggcacatggctgtagtcccagctactccagaggctgaagaaggatttggagtccagcctgggcaacacagcaaaatcctgtgtctaaaaacataataacaatactataaaataaataattaaaataaaaataattttgggtaaatcttcactcggatttaacccttgtgtgtttatgtggctaggcatctggaaagcaggaaacacaggcaagcgttgatgctgcagtctcgtgtctgagatctgcagggtaggccggaccagctgcaaactcaggcaggatttctatgttactatcttgaggtagaattccttctactcccagaaatttcagtttttgctcttagggtcttcagcttattagagtaggcccacctacattattgagggcaacctgtttcactttttaccaagtcaacttattgtaaatgttaatcccattcacaaaataccttcacagcaacatctataatgatgtttgaccaaagtgggcacttgagccttgccaagttatacataaaattaaacatcacaggcatattttttcaaccataagatttttgattgacagagacatttgggatcaaagattatttgtgctatataattgaaataggttaataaacatttttcattttttagcaataaggaaccatatttctactatgctatagaaactttgattacatgaaatgtaatcttacatgaaattacttactgagcacctaccacatgccagagactatggtaagtgctgatcacatggcagtgatcaagttcaatgctgctctgagaagcctgttaggggggaatttaacctggctgcagctgctggcttgcaggtcgatgggtggccttttgatgaggtgacatttcagctaagactagaataagtaagactttgtcaggtgaagatggagatggataagaacattccaggcaaaggaaagagcataaaccaaaagctaggagttaaggaaatcgtggagtgtttagagagctgaatggaatcccgtttagtacatacagcaaagagaaagaggtagaaaatcaagctggaaagatgagctgaggccagacccttacaagctacactaaggacttttcagttttatcttaagggcagtaacaaatacatgcactaatctatcctgttattttctattatgtcaaagaatgaaacagtgtaacttattagagagggaatgaatgcagtgtagaacattacttgctgtcatcctcattgtttcaaaacagagcatgtgattaaacaaatcaatgaagtatcactttatctttaaaaagatgattccattaaaatacaacttcagtctaaagaaacagatccatgtctaatgtggtcccggttatgacatttttgtttgtgattctgatcacttcaagaaccctgcagtacgtgcactttgttttgtgaatgaaaattatgtggttggctattctaatctaaaaaacaaaaactcctggagcaccatgagtgggagctggggttcagctatgtcttcctgctaaaatgacctgatcactcccatcctggtgcttaaatccatttatttttataagggttcagaaggcttctgagaaaagaattcgtggtaggtacaagattggggttcagatatacaagcaagtcttataaagaagggctgggagtggagaaacaaaaggccaattacaaggaagtcctgtgtggcccagaagtgtcttcaacccagtggaaaaacaagtgtgacagtgactctgcgggagtcgccagacttcagacagcagcgatcgtggctgttgaggaactggactcaaccccgccatgctggcagcatgcaagcttggaaatgagcctagcagaagtgtggcctttgtggcgggatcaaagcaatgggctcagggcccgaactcagaagaggctgcagaagaaaggggagcctctgcagccctgtcctgcagcagcagcagcagcagcagcatcttggaagtgacccggacaacacagctgcagctgcggcatggagagcaggtcagcaagagcaggtactggcctccaagggcaataggaggatcgtccggaatgtgcagcgatgctgtgatttgcccgagaagggcctgtgtgcttgaagcaggctagtggtgtgggttatttgtccaggcctgccttgccctgaggcttttaatcagagtgcggaaaagagagcagcgaagctgttctgggagaaacgtcatgactggcagtttgaaacatctcctgggttgtcactgtcccaagcacaaagctcaagcgtttgtggcaaggccctatactttatgagagctggagcaaatgatagcaacccaaaccttaaaggaggcttcactccccaatattttactcacctcggatgctccacatcaaagcaggcctgtgctatcgctgtgaagacctgcctgcgaagccaggatggtgagttgaggagggatccagcctcggcaggccactgtgccagaaacagcctctccccataaccatcagccatgatctaatcattggaaccccaaaggaaaactggaagagaaatcccagagggttcctgggagctcccccttctcagcaacttctaaactccattttgcttataatccagaaacccagaggcttatcaaggcaaaaaaaaaaaaaaaaaaaaaaaaaaaaaaaaaaaattgtctatctatgccattgcctacaagagtggatggaaccttccttatattcacatcactgcagtgccattctagtaatttgccgagggaactggacttctataaagaatggctaaactactaatctaagagggaaactctcagtagcccacagtggttgcattcttatttagctgataattggaatatatgtcccttttcaccaggctcctatgatagaccatgtgaagatctgaacgttatatacagtttcttactgtgagtttatcattatgctcagcagaaaaagaagaaccccccctaagggttgagctgtgggcacatgacatattcacaattgtggggaataaaaaaattagtggattgaaaatattaaaatacagtggtcaagaaattcaacacattaaaagaatcaggaagaaacttcagaaacttccccatcacaattgtcatatttaatttaaaataaaaacttcaaattgactgccactaattcatctttttggataaattgtgaggaactttttggtggaaaaattacttaaacctggcctgatgattatgaaaaaaaattaatagagaaattttctttcttatgttaccctattgtaatcatgttaatttcaattgtacttatttctgcttaagatcatatttcatttgcataaatgaaaaacaaaatccaataactttaaatgaatttgctaatcttaaggaaataaccagctcctttaaacatgaattagacaatggtttcacactatcatattgctagacagataagacttagaaaaagaaagaaagccggttgcaaaagactgtattttctaaatatctaattcctcacggcataatgtgcttctgaaagcaagtttttaattattaaaaaaaaatcaaacaatatcagaccttgactttgtaaattagactattgatgaagtgcctttccacttcactactgtgaagagaatgagtgtgataaggccccagaagtgttacttctcttttgttagatttattccttctaaatcaattccctggccttctcacgtgtgttttcacctccctgagtggccaaaacaaacttttttaaagttctgttcagaaaagcaattacgagtaataagttacagtcataagcatcaaggtacagatggtttaaatctagagagtattactaacagggctatgaaaagaaaatgttgggatgattttaaaaattgaagatcacaacctgctatgaatttgtagaaatgatttcagtgccacccattatatcctatagggaagaaaacagagcacacacatgaagcttaatatttaaaatgatattgtagcatgcatgtagagaagtacacgtatcttaattgaatgggtcaataaatttttacatatgcactatacatatatacatttccatattgctagcacccaggtcaaaatattgaacactgtattagatcctagagctgacataaagcaccacacgctaggggtgtaagcaacagaaacttatgcctcacagttctggaggctggaagtccaggatcaagatgttggcagggttggttccttctgaggctcagagggagaatctgttccatgcctctcccagcttccggtggttgttgagagtctttggctctccacagctcagagatttgtcaccccaatctcgcccttcatcgtcacgtggacttctcctgtctctcttcacacagtcttctctctttgcatgtctgtctgtgtccaactttctcatttttatcaaaacagcagtcatactggatcagggcccaccctagtgataacgttttaacttgattagttctgtaaatataaggtcccattctgaggcactgggggttaggaattgacatatctttttagcaggacacaattcaacccatgacaaatgcctacaacacctcatatggatccttcctacttctcagcatagaccaaaccctccccgcagagaagaccagcgttctgacttgtatcacatagattaattttgcctgttctttaacttcatggaatcatacaccatgtactcttttttgggggcttcttttgctcaacttatctatgatattcatccatgtttctgtaacagcgatcacttattattttacagctgtgtagtatttgttctcttgaaaattttggtcgtttccagttcttggctattacaaatgatgctgccactggctgtggcacacattgccatttctcttgagcatataactgcagaatagacgtgctttagtagatactgccatacatttttaaaggatgttgtaccaaactatgctcccatagacatttaaagctatacctaacattacacttgtttttcttttatggttgatgtatttcttggtcctattttaaaaattttctgcctacactatatcatgaaaaaagtttatgtatttttcctagaagtgttattgttcttcttttcatatcattcttcttttcatatcttaaattgttttttgtgaatggcaagaggtaggggattaaagactaaggttcattttttgctttacgaatattcaattgctcctgcactatttagtgaaaataccattttcccttattaaattgcattggcaactttgttgtaaactaaatgactttacttatggaggggtgtatttctagaccccctgttctgtttcaattgtttcgttatttttgcaccaataccatattgttttaattactgaaactttataataaatcttgaaatatagtaatgtaattccatcaactttgatcttatttttcaagattatcatgcctattctaggtcttttatatttccatgcaaattttagaatcagtactcaatttacataagaattagtactcaatttacacaacttagacaaaaccttaatgggatttttctttgtatttcatgtaatgcatagattgacttagaaatagttgacatgttaaaaatattgagtcttcctatccatgaacatggaatttctctgtttatttaggtttctgtaactactgttaaaatataaaccattaatgctgtagctgctttggctgaaataaaacgaggattctttgtaatgagggagagagggtaaaacgtgaaatccgttgattgcttcattcaaaggccaatgaatgcattacataggttgaagccagaagatattaaattgttatactttatgtaagatatcattaacgtggttagctttattaaacatgaatgtattcaaaatacatgagaattattatatggaaccataaaatactttaatacaaaaggctccctatttatcttgaggcaagtatatttaaaagagaatttttcttgtataaaaagacaagtgttccaaatttgctgtcttcttctatgaggacaagtagccagtagcatgctgcctagcgtaacgttctcaaactcaaagtgtgcatcagaagcacctggacagcttgcaagatacagattgctgggccctacccctgcagtttctgattgagtaggtctggagtgtggccaagagtttgcatttattacagtttcccatgtgaggtctatgctgctgatccacgtagggtactttgagagccattaacttagaacttagggatatttacacacacacacacacttaatctgtaccttttagacaagtgtaaccgcttaagaataaatgaaaatgtaactttttttattgtcgtgaaacatatgcaaaatttacaattgttaagcttacagttgagtggcactgagtgcattgacactgctgtgcgaccatcactaccatccactgaacaccttgtattatcccatactaaatttctccccactaaataataactgtccactcccgtttactgcctcccctggtaatcaccattctttctgtctctatgtatttgactactctagggacttcatataagcagaatgattcaacgtttgtcattttgcctgacttatttcacttagtgtaatgtttttaagattcttccatgttgtagcatgtatcagaatggtactccattttatggctgaataacatagaagtcttttttaaagcatgtgttacatagaggatattttgaatgaatgtgtttttataatgtaatttgagtgcgttggaaacaatgtgagtcacctatagatactcttttatcttctccttaaaagttgaaaacataatttagaaacttgttttaaaatctgtcaaatgaaagtcttaagtagattttaaaatcatttgtcaaaaatacatcagctgccttatagtctgcaagaagaattgattaacatcaggcaaaactgaaaatttctaaaatcctctcccaattattgaatggaattgcaaaatgaatgtcagcgtttttaaaaggaaccagttttgttttgttttgttttcaagttaatttttttattatactttaagttttagggtacatgtgcacaacgtgcaggtttgttacatatatatacatgtgccatgttggtgtactgcacccattaactcgtcatttaacattaggtatatctcctaatgctatccctcccccttccccccaccccacaacaggccccagtgtgtagtgttccccactctgtgtccaagtgttctcattgttcaattcccacctatgagtgagaacatgcagtgtttggttttttgtctttgtgatagtttgctgagaatgatggtttccagcttcatccatgtccctacaaaggacatgaattcatcattttttatggctgcatagtattccatggggtatatgtgccacattttcttaatccagtctatcatttttgcacatttgggttggttccaagtctttgctattgtgaatggtgccataataaacatacgtgtgtatgtctttatagcagcatgatttataatcctttgggtatatacccagtaatggcatggctgggtcaaatggtatttctagttctagatccctgaggaattgccacactgtcttccacaatggttgaactagtttacagtcccaccaacagtgtaaaagtgttcctatttctccacatcctctccagtacctgttgtttcctgactttttaatgatcgccattctaactggtgtgagatggtatctcattgtggttttgatttgcatttctctgatggccagtgatgatgagcattttttcatgtgtcttttggctgcataaatgtcttcttttgagaagtgtctgttcatgtccttcgcccacttgttgatggggttgtttgtttttttcttgtaaatttgtttgagtttattgtagattctggatattagccctttgtcagatgagtagattgcaaaaattttctcccattctgtaggttgcctgttcactctgatggtagtttcttttgctatgcagaagctctttagtttaattagatcccatttgtcaattttggcttttgttgccattgcttttggtgttttagacatgaagtccttgtccatgcctatgtcctgaatgatattccctaggttttcttctagggtttttatggttttaggtctaacatttaaatctttaatccatcttgaattaattttagtataaggtgtaaggaagggatccagtttcagctttctacatatggctagccagttttcccagcaccatttattaaatagggaatcctttccccatttcttgtttttgtcaggtttgtcaaagatcagatagttgtagatatgtggcattatttctgagggctctgttctgttccatttggtctatatctctgttttggtaccagtaccatgctgttttggttactgtagccttgtagtatagtttgaagtcaggtagtgtgatgcctccagctttgttcttttggcttaggattgacttggcaatgtgggctttttttggttccatatgaactttaaagtagtttttccaattctgtgaagaaagtcattggtagcttgatggggatggcattgaatctataaattaccttgggcagtatggccattttcacgatattgattcttcctacccatgagcatggaatgttcttccatttgtttgtatcctgttatttcattgagcagtggtttgtagttctccttgaagaagtccttcacatcccttgtaagttggattcctaggtattttattctctttgaagcaattgtgaatgggagttcactcatgatttggctctctgtttgtctgttattggtgtataagaatgcttgtgatttttgcacattgattttgtatcctgagactttgctgaagttgcttatcagcttaaggagatttggggctgaaacaatagggttttctagatatacagtcatgtcatctgcaaacagggacaatttgacttcctcttttcctaattgaataccctttctttctttctcctgcctgattgccctggccagaacttccaacactatgttgaataggagtggtgagagagggcatccctgtgttgtgccagttttcaaagggaatgcttccagtttttgcccattcagtatgatattggctgtgggtttgtcatagatagctcttattattttgagatacatcccatcaatacctaatttattgagagtttttagcatgaagggttgttgaattttgtcaaaggccttttctgcatctattgagataatcatgtggtttttgtcgttaaggaaccagttttgatttctttttgttaaagctcttcataaatgatctttctcaggtacaaaaactactaaaattgagtaatgattttatcaaataaagtgaacgtaggtctaattctttacattgctgtgtgcagaatattaagccaagatttttttaaataaggtattttctaacatactgttctttctaaattattgatcatatttttgtgaaagcaaaaagtatttgctattatttgataacaaatattttaaaaatataatttcaccttcatttcatacttttcaaatttttatttttgcatgttttagataataaataatacattagtagagtaatactgtaa

SEQ ID NO: 348 - DNA, 85075 bp, Homo sapiens
cctaaaaaattttttaaaaaattctgattatcatatgatccagcaatctcacttttaggcatatatccaaaagaactgatatcaggatctggaagcaatatttgtgcatctgtggtcattgcaacattattcacaatgttcaggtccttttatatgatgccctcattgcagcaatgtcttcctcccaacaccatctgacaaactgctatttgtttttaaacctcactttaactgtcaccgcccagagaagactttctaaaacctttgggcaaattttattactttttgacaatgaatgcctgaggcttatccagctttgattccagaaacatcagcctgtcagaatggctaattttcatgcatttgtgaatgctggatggctaaatccagtgattttcaaagtctcgaacatcctctttttaaatgtagaacccattttccaataaagccacaaacagaaactcaacatgcaaagttcttgaatatggaacttttggggcaatactgagagtcgcaaaagttcactgaatgaaaaatgcgggttgggaagactgcagtcatcagacctttgctcactccttacgtgttcacagaggatcaaatgaatccctagagcttgaagtaatgccatagaagaaaaaccactaaagtagataatctgatggtcaattcttagttaatgtacaaatagaaaaaacacagagaccactcccaggtaatatgtaagtctatctagaaagaaatgcactttcttggctgggcacagtggctcccatctgcaaacccagcactttgctgggatgaggtgggaagattgcttcagaccaggagttagaggccagcttggcaacatagtgagaccctggctctactataaaacttgtaaaaacaaacgaaaatacagtaacgaaaaaagaaatgcactttcttaaggtgtcatttggtaagaaatgttatgtgtctgattttgcccatgcacaattttgaatataataaaaaaggtagcttcccctatttagaatatataaaacagtaacaacaagattgtataactcatgattttaagatgataatagaaagattagttgaaagtttttaatcccacactgtggtatgagaactattttatttatatatatatatacatatatatatatacacatatataattatatatatgtatatataattatacaattaggactgaaagtctgcaacaaactataatggatgtatgcacttgggacataagcttctagttcctctttatttatgaaccaagagaaacagctaactcagggattgtttttaaactgactacagattcccaccatggggcaaaaatatgggtgacatgacacatcaccagctgcagtagctcagctcacatttctgtttaagcattacacacataatatcctgtatgctgatcatttaaacttactgacgcttgtaatcccagcactttgggaggccgaggggggtgaatcatgaggtcaggaaattgagaccatcctggacaacatggtgaaatcgaaacagtgtctctactaaaaatacaaaaattagctgggtgtggtggtgtgcacctgtaatcccagctactcgggaggctgaggcaggagaatcacttgaacccgggaggcagaggttacagtgagctgagatcacgccactgcactccagcctgggcataagactgagactccaagtcaaaaaaaaaaatgcagatttcttggtactaacctaggtttattacatcagagactctaagggcaaagagcctgagtctccattttaaaataaatgtccctgagagtgactgatcactggttggatttcagagttactgatagaggctacatttgtatttacctgagactcccttgatatttcttacctactatccttttcactcaaatggtgaccatgaggcaatattttgagcaaatagtcatccttaaagttaccttgaataacttcatggtgaccactgcctatgtttaagaccagacttgggtttaacatctctccaaatgctagaatcactatttccactatacttccgctagtctctggtgattctttggattggacttcaaattctcttgcagtgtagaaaagaattacagatgctacctctcatgtgtacatagagctgacatttcagtttttgaattccatcctcccccctcactattgcatgtgatctgatgctcttgcttgaacttcttgtggtgtgcagctctgcaccaaatagcaatgaattggtacatagtaatgcagacacatggaaagtggaatcactgattttttttttttttttttaagatggagttctgctcttgttgcccaggctggagtacaatggcactcgcaatcatggctcacagcaacctccgtctcctgggttcaagcaattttcctgcctcagcctcccgagtagctgggattacaagcatgcaccaccatgcctggataatttcacatttttagtagagacggggtttctccatgttggtcaggctggtcccaaattcccaaccccaggtgatccacctgcctaggcctcccaaagtgctgggattacaggtgtgagccaccatgcttggccaactgacatttattttaacaacattagttgtggtattaaataatgaaagtagcccgtattctttgcagacattttgggaaatatagaaatgattagacccatttataatttcaacacaagcagtggaatagctaataccttcatttatgttttttgtcttaccctgtacatgttttagtgcctgaatttttcacactgagtcacaaaaagttttccatattatttaacattcttctatagtatcattttctgtaatttgctttttaatggccatatgatattccattatgggaatttatttaaacgtctcctctcatttcacatttaggttttttccaacctttttctattaaagagagtactgacattaacatccttctccataaaccttttgtgcatatatattatataatatattgtatacattatttataatataaatttattttatattttaaaatatttattttataacatggtttacacattataaatgtatatttataatatttatttatttatttctaggataaattacttgaagcagaatatctggaggaaataaaaggttttgggctcagcgcagtacctcatgcctgtaatcctagcactttggaaggctgaggtgggaggattacttggcccaggctgcagtgagccctgactgtgctactgctactgcactacagcctagatgacagagtgagaacctgcctcaaaaaaaatgtttttggcattttaaacttaaaaaaaaaatatatatatatatatagccaagtaactctccagaaagattgtaccaatttacctttgatgcacagaataacatatttaatttttattttgcttctccatcactaatattatgattaaaatattagtaattactttaattttaatatcttgaattagtagtacaagtaagagatttaaaaatgtttaatgactattttactatcttctgtgaattgcctatccacgtcctttgctcaattttcttttttttcttgttttttcttctcttctcttttttttgagacaaggtctcgctctgttccccaggctggagtacagtggcgtgatcttggttcactgcaacttctgcttcctgggctcaggtgattctcccacctcagcctcccaaatagctgggaccacaggcatgcaccaccatacctaactaatttttttgtattttttgtagagactgggtttcgccatgttgcccaagctggtctcagactcctggactaaagcgatctgccctccctgacctcccaaagtgctgggattgtaagcatgagccactgcgcctggccctttcctcaattttccattagcaaagtcatcttttatatgaattactcatttcataatatgtaggatagcaatcagaaacatggtattttcctctatacaaatattttaatttgtaagtaattacactgggagtcatatacttatgcaaataatcttaactggtacggatattcaccatcagacactttcttttcttctcccagccaagatgtgatgaacaggcaatacatctttttgtttgttttttgattcaattatatttatttctgccccaaactttttattttgaacagtttatactctacagagaaattgcaagaattttaataaatacctctctgtccttctcctagcttcaccctttgtttgttgaaaggagatactttagtgcagtattgcaacagcttatgtagacatgcaaccttgaggtcacagacctatgagggattgagacaaaggcaaatttagcaaatattttccagagtactctgctgcaataaccacgtacccaccttcagcaatgacctggtgaacagggagactactgcttagtaacggagcaattctcagctcaaatctggcaggttctaagttttcttgcctctgtggttttgaatggttgctcttactatgtgaaaatggaagacatcatgtcctgttcatgtttaagaattaattgagatttccccaggggcaaatacttcacgatactgctttcctcagtgatatttaatgcacttcctgccctcatccccaattaattaagcattttcctctatacaggagatttatgaagtacttggaattccattaaaaagaggtaatatgtgacttaaatgaatgcataaatacatcaaatataagatatctcagaaatggtttctgtgtgaattttgttatccacaagcaacttgtattattttcatggctacaagaaatttcaatgtggctgcttcccaagctgtttcccaagcaagtaataaatgttgtattactttatttgaatataacaaagctttaatttatgattgcatgtgcttacattgacaccttggcatttcccttcaggcttttctggacatgaaaaagatgagtgaatttggctggatgggtctttctgttctgattcaccagctgcaccccaagcatcagctaactaacttggaaatatattttgttttggtggggaatctatgacaaaatataattagatcagtgataccactgggccaataatgaaaagcaaatgctatgtacaatagtgtcatgtttatttatgaagtgtagtatcattatcccagaatgaataatgaatgaggcatggaacttaggtggttagaacctgtaagaacaatactgtgggcttcatccccaggtgtcctccttatcatcacattatttcacctccttaaattactatttactcacctgaaaaatcagttcataaaatgttctcaccttcattaaaagaacactagtaataattgatttccattaaaagtatccacatatttggggggaaacttgtaattctttattctaaagagtttccaggaactgaaagtaaatacataaacacaagacttggattaaaatgtaaataatatcttttaataagaacccaacaaggcatcttaacttcattatattatgcattctgtagaaagttcaaaaaagatgataagttccttgttttgttttgtttgagatggagtttcacgctgttgcccaggtttgagggcagtggcacaatcacggctcactgcaacctcaaacgtgatctcctgggctcaggtgatcctcccacctcagcttcccgagtagctgggatcataagtatgcaacaccacatgcagcctatttatttatttattttttatttatttatttatttatttagtagagacagcatctcactatgttgcccaggctggtcttgcactcctggtctcaagctatccttcttccatagcctcccaaagtgctgggattacaggcatgagacaccgtgactggtcccaaaagttcctttttaactgttagattccttagctcacaaaaatttgttgagtcattattatgtgtcagaccttgtgttaagtactagatatcaaatacagttcctacacctaagaaaagaataacatatactatggtataccaaaggagaacatcaaagacagcttcaggctaaaggatggagatagatatacctggaagtaaaattaaaatctagccagatgttttttctattcctgactcaggattaaaaaccccacttcaacacttttctctctagcagaaatatttaaaaccatgtcttttcctggcaagattttcacattcatatctgttttgttcattaatccattcattcaactaaggactaatttgaaatggatagcctgaatagaacttgcatgttaatggagggataccatcttatataagtaagggagcaaaagttaaggaaagaggaaacaataatattttaatgtaaatgtaaaataattaagttttaaaatttattatttataagaaagtattctaaataagacgaaaaataaatcttgaaaatcaagggatatataaaacttaagaaaagggaaaacaatggtaaaataaaatcatgtttaaaaattcatctgttattttgggaaagtcttccaaacaaagtgacaaaaagtatgttgaaaatgaaatgacatgtcaagatatgtaggcaaattcaaagaaaagaaaatcaaaagtgatgacaatgttgctatttcaccagaaggaatttaattccaaaaggagaaatggaaaaaaaaagagaaacattatgtaatgatagaaagtacaatttgtgaagaagatataacagtcataaactttcatgcactgtataaggaaggagccaaccttatgaaacagaattcctaaaatgcagagaccacacacatgcacagaaccacagagtgaggtctttttatacacacacacacaaaaacatgatgaaaatctcataactataatcccagtgctttgggaggccaaggcaagaggccaggagtttgagcctccagtgagctatgattgcaccactgcactcttccaccctaggtaacaacagagtgagactctgtctcttacaaaaagatacataaaaaggaaaagatataggatatttaaataacaccatcaataggcttggtaatatggaatattataacatatgggtgtgataatatacattcttttcacctatgaaacatttgcaaaagttaacgcaacttgttcacaaagaaaaccttaaaaattctatactttgggagacagagacaggaggattgcttgaggccaggagttcaagatcagcctgggcaacatagcaagactctgtctctacaaaaaatgaaaaaattagctggacgaggtggtgtgtgactgtagtcccagctcctcaggaggctgagatgggagaattgcttgagcccaggaggtagaggctgtaatgagccatgattgtaccactgcaataaaattaattaatcaattaattaagaaaatctaaaatgcttagaatgaaacagttggttaaattaacaaaatttataaaatacttgaaaactaatgattgaaagatgactcactctaaccccctgaaaaaataacaaattgggttttaagacgagaaaactggaaattaagaaaaacttctctaagtagtcccagaacaacaaaataaataaaaattaaaagtacaattttacagactaaaaaaaaaaggaaaaaaaatggggaataggatggagactacgtcttccaaactctgtacttgaaatgtgagcaaggaggtgtaagcacaggagagagtttagatatagatcccaagaaaatcttatagaaaaaagttggcattttaattctatggacaacgaatgctttctttattaaaggatcccagtataactggctacccattcacaagaagataaaagtagattttcttcatgacatattaaaataaattctaggttaaatatatacatgcaaaagaaaaaacaggaaaaataaaaaacatttaaaaatttaaggaagtatttgaaatactgtataatcttagaatggggaaacattttgtgtaggacaggatgcaccatataaatgagctctgtcccaaaggagttcataacctagtgccacaaataatataaatatgttagaggtagggatagaatatgctatttttgagataagaacaaaaacagtgaggacctagaggacaattcaattcattctatgatgggcactggggaagggttcacagaagcagcattgagctgtttttaaaggagtgaatgggtgtcttctaggtagtttgtgaaaaggccccaaatcattaaaggacctggtatttcagtgccagtgagaaattcagtgtaactaatgtgtagaatgaatgattgcagaggttgaaaatggaccaatttttgaaagagtttatattccaagctaagaagttttaacttaatcttaatgtctgcctcctgcttaaggccactgattgtagttgaagctatggtgattgtcagatcaatcaaggagaaagagaagagcgagaaaatgtttggccaagactggtaattgcagacttccttatctattctccctcttttccttattagcagaatcctgattttagttaggatagtcttgtacccaagctaatagtcaacttgactcagcttctcctgcaactgagcttatctatgtgactaagttgtggctaatataagcagaagtgctgtttagaacactcaagaaagttccttaaaaggagaaggtactcctttgcccttctttcttttctccttcttccagattgccagaggacatgatatttggattacaagttgaaccaagggatagaagtcttttattaaaatgacggctttctgaagactatgtggacatactcctacataggcttttttgtgagcaggaaatgaatttctgccttgttgaagtcagatgtaccaaacctaatcccaaatgataaagatgagtaccaatgtaaatgcaatgagaaacccctacatttaagaagtggtcagagaagaaattaccagttaaaaacactgaaaagagtaagacgggaagaaatggtatagaaaccaagacaaaaggacaggcccaagaggcaggataagggcaaaataagtagcagatgtttaaaagagagaagtagaaagaggcttgaatgcagcacatttaatttacaattgcaaagttgtgttgatttgagatcaatttcaagagtgtggtaattgcatgaaaaccaagttgaaatgggcttctgagtgaataagagtcagggagctaaattaatatttaatttcagaaaaaatgaaataatttcagaaaaaatttcacctaaagataaggtgaaatggaaaatagatgtttcatgtcttttctgacaaccaaattgtatctccaattctcatgatcctgctaatattggctaccatttattaaattaaaagaggtttatctaatcctttgataaactcaaaatcttctgaataactagaaatgaatggcccttcccgttcataatcactttcattccaggaaccatttatattcctacatagtatgctattctggaaaacaaaatattttctagtctcaactcaaattctgtcaaggcaatacgtgtgagtgtaagtagagtggggatagagatagcatgaagttctgatgtctgaaagaagtgaagcttcatttgattctgaagaagttcttgtccaagtatccaaccatttgaaggtatagcgtttagtttgtatcagagatttacaattccccataaagaaatgcaagaactctggggttcatctgtgatgcatttgcaaggttatttcccctttgatccccaggctctggcccctagctgtagcctctttttcctcctccctctcttctcctctccttccctccctctctccttccttctttgagggataatgcagttatatcagaatagaagctatgtaagaaagggtggtatactggattgcttgggatattttaatacatattcaagagaaaatgacaaatatatcttaatagaaaaggatacaaattaaaaatcagaaggcaagaccaccaggattaaagatgcaacttagatcaaatattgaccaaagtaaatgggttgaattttgaatatagcatagatcatacttagtgagaggctttcgaactaacgacttacatttaataataattagcatgtcacagaatatagtttatgattattagaaaaatgaagttaaatcaatacttgggagattgtttattaatgtgtgaattatgtctttttttaatattcataaatagttttaaaattttaaatgtgttttagaaagaaattggttactccttgggaaaaaaataagtgtgcattacaacgtctagtggaagagtttaaaggatagattttcatttatatttaggaaagaatgtttctcttgccttcctggatttgctccatagcaaaagacataaatacatattgtaattataaattgtgcattgtaattataagttgtaaattctactacaaaggtcagctatggttagattcagtgagttttaccttaaaatattggcttaaaacaattcaaatcaaatggataaaacaactttttgctttccaatggcattatgattttgggtggtatgggaagagaagttctcaaaccaatagtcttcaaggttgcagagagaagcttctgtctgccactttcctgatgtactgaatggcccttggtatatctttataaaaatgttaaaacccacagagctatttaaagataaaaaaaaccttacataactttatttttcaaagactaatatgtctcaggtacatttagctacagtacaaaggataagaaaatagcacctaggaattttttaggttgtagagaatctcaactgctttaccttttgtattttctctccacttctctagcaaagaagacagagtgctcccattcccacttcttcagcctattgggtcacaaggggcctaattttcatgcgaacagccctgagggaataatctgcccctctaaaggaaacccagaccactccattctcaatctcataaggactgttattccttgggtcataggagcccccagggtagtagattccattgagattggctgcttggcagttattataccaccagcctcccccatagacttctgcacagttctcttcccactggtctgcatccctgtcaaaggtgctgaactgcatgttgttgtgagaggtgtactctgccccttcctctacggaaccctcaatcagagcatcacccgcagtgccttcataggaggagacttggagggcatagccttcagcctcagagcctacccggaagtgatattctgcataagcttcattcccagcccagtcctctaattcaaccctaagaacagagcccctttgggttagtaagtggaggtagtcattgcctagccagaattctccttccccctcgtcattcaggctgccgaaacctctcttgtagtcttgccaggtccggttaaaattcagtgatccatccattctttgctggatcaaaagccatcctcccaaactggtctcttgatcgcaataaacagaaaaaatcttactggatcccggtagcttgatattgaaaatgccactttgggtacctgaaggatgtgtttggaggacatcatcacagtctaaaaaaaaaattaagctggttggaagaagttattctcatttaactttacaaagataggcacggctcagattaaataaggcaaatactgtttctttcccttcctttctttcttcctcctttccttccctccatagggaaaggatgcacttacagtgggatagaacttatgcaaataagcggttatttatacctacaaattgcaaaggggattttcctcaaatgtatttggaattttacttgcacaaactaatagcaagtaaccagtacaggtagctaagcatcacttaatactaacacaacttgtatttagcctgacctaaatgtcaactgagacacatactaaaaatgtgattaatcagttgggtgacaattctaatagcacacactttgaatagtgaaagaatttgactaaataagctcaaatagagtttcagaggaattcattcatccatttaacatgtatttattgagtcatggctctgtactgttaggcatttgggaatacagagatgagacagacaaaggccctgcccccaaggaacttacagtctagcacaaaaacagaccaaaaaagtgtagtttcaatgacgtgtaacagagagttaagaaggaaatgcaaggggccatgggaacactgtgcagaaatatttaacttagtctagggggacagggaaggcttccccaaaggagaagtgtggatacctctgacagggcgagatttagcatggcctctcttggtgctatgtgttccttcatgatcggcttcacttccggcctcatctgccattttatagctcttgctttcaaatgtggagtctcctctgttgtaactcgtgctactagtaaattgtttgctgtaacttgaagatttaccacgggaagggaattcagctatcccagggtgatgagaactggattcctttgtatttgtgaagatgccagattctgagcccctagactcagtctcactgacaaactctcctaacataggtgagaagaaacctgggaatgtttttccagttgaggcagtgtcgaagaaggcagcttcatcagggtgcctatggcggaacccatccagagtacctatgccagacaatgtgcctaaatccattgcctcgggacagtcagaaccatcttcggaggtcaccacttctttggtaacttctttgtgaccatcaggaccaataacagtcttagtaacggttttagagcatgaacgacgcgtggtggttgtgctaccagaggtgaccttctctttaccagtcctgagctctttatctcctttagaagtgaccagtttttctgtgtggtactctctccttgtccctggacttacatttcctgacacctcttcaaatgtgccccagtctgggttgttaggcctcgcgttcccagagcctgggctatctggcctaaaacttccagattcagagtgccattgtccagtactaccagatacagagctctcagaggtccagtgcccagcacttccgcgttcagagctgccaggattccaggttccggtactaccaggtctagggctcccagggttttggtttccagtacttccagttccagagctcccagagttccagcttccagtacttccaggtccagagctcccaggtttccaggttgcagtccctccagtcccagagctcccagggtttcggtttccagtacttccaggtccagagctcccagagttccagcttccagcactgctagggttcctggggctttccgtctctgatccggttccataagaggtggagcctcctcgagtaatctcatttccaccaggtctctctaactccattctcatctgcggcatgtctgttaatgccttccactctgggggtaccttctgaagctggctcttaaaatttccgggaaccaagtctggaactggtttcatttttatcagtggtaagtgttgcctatctctagagggaagtaagtctttggcaatgacctgttcaagttgcttctgctgatcttcatagtccttcagatctacttcacgagctaaagccctactgcatgaccctcgacaagatcggatcttaatatcaatgtccacctagagagaggggagaaaaataaagagaaaatgtagatacaaatacataaactacgtctattgagttcctggtagttaattttccttctggaaactggtttcattttttttgactcggagacctaccacttaatattctctgttttctgcctatcgagcaccctcagtggaagagatgttgggtattgcagggctagccaggataagcaatggatgctgtttaattcatcttagcctcagaatggatcaagagtaaggtgctattccctctcaaaggaaacgctaattaaatgatccttggtgaaactcaggctgagggctcagaggtgtggtgatgtaatgggctttggaattagacagggactgaacatttgcttttgaaatttactatctatgtaccgttggaaaatttacttaatatctctgaattttttttcttcaactgtggagtgaggaaaataatacctacttttaggtagatgatggatataacacttttctctgcatatagtagacactcagtgcataactatcgccttccttttccctctactcagaaacaaggacatctgggaccacagccacatacttacctccagtcgtttcatatcaaccaactgagctctaacatttttctgcagaagctggatatgctgtactttttctatgactttgcgcttcaggacttcaattctgcttctcagatcctctgacactcggttgtaggtattatcacggtctgaaatcgaaaatatggttattgaagtagctgctgagtgatttgtctgtaattgccagcaaaaaagaaaggaagaaaggaaggaaggagaaagaaagaaagaaagaaagaaagaaagaaagaaagaaagaaagaaagaaagaaagagaaaaaagaaagaaagaaactagcttgtaaatatgcctaattttattttggttacagtttaatctgtgagttcaaaacctatggggcatttgacttttggataatgttatgccctgcagccttccatgaatgccagttaagatgtcctaatagcaattagtaatcccaaagaaatatagaagaagaactttctttggaattttaaaggtgtaatttggagttaaaatagttggtttgattgcatttcaattattttataacatccttaatcaagggacttgaacatattggattttcttactgatgagcttttctttttaatctatagatttgaaatggttcctaagctgttttgggtcaacaggatcactcacttgccagctagtgttgcatcactgattttaaatgtcaagtgtttgtgaaggtgtaaaaaggcaaagcaaaacttgagaaactgaggactccctagactcgctgtccatgcccagagtgaatgcaatgtttcctaaccctaatgagtagactgtgagaatgacgtagcttgaccctatattttaaatttaaaaatctacctaatcagctcagtggagtctgggagttgaattcccagctctgtgtctttgaacaagttccttgacctctcagttttcacctttacaaagcagaaacaaaaatatcaactcaaagagtctgacccatcctactttcagtatatactgttgaaaagaacacatttaaattcttgtttttaatccaaaattctgacttattttgtgaccttaaacaatctcagttaacatcttttactttgaaaaaataacgaaaacaaaagctccctcttaaaattttcagggatattatgaaggtatgtgtttctacactaagtactttgggatgaaattgtcatagatataagcggatatcatatttatttaggatttttgttgtttctgttataaagtcaaagcagtaaatatgtaatacttactattggctgaggaaaaatcgcctctcaaaatttccattatattagtggtcaacgaatgagaatccttattgttcttctgatattcaaatagtgaatttttgagcttatttattctgtttgtaaaatcttgattgacttcatcaatcaaccctttcatcctgcagccagaagggcatttgtagttctgaaagtgaagggagaaaattacagtaaggatctatctctcagattcagaataattttgcatgtttccatgcagcccccatttcttcctaccctatctcttccagataagttggcttaaaagtaggtaagaggactagttagaggtcgcagagaaactctggaatgagggtccacttagccataaattaggtgccaggaaattgaggccacaatactcaggagcctggttttgcctgagcatgcaactgaaatcctgtctgttcacccactaatgatccagagttggggaggtaaataaacagtgctcttgggagtaggttccttttctttatttgctatgtaggtaactattcaattattttctatttaaaaaagtttctgggaccaatcaggtcagcctgtgagcccctctagcatcagagggaaggaatctcctgcttcccccgctgactgcttacccagtcttcatcagagcagaagggccagtctgaatctttgcaggcagattgatgtctttccacaacccttgggccacgcacgcctcctccttcagctagaaagtcaccttcaccactatctgcagtctttaaagattcattcacatacacaaaagagagcaacagcaatgttagccagaagaggagacagtggcatgcctacaagtccccaggaagagatggcactctcacagagattaaggagagcagacacagggcttcggcaagcttcaggtttcttatcttcaaatggaaatcctaggacccattttatggagttgttatgagaattaaaggagacaaggtgtacaaatttcttaactgtgtgtgacacttaaataagcatttgataaatattaggagttttaaagaatccatcctaaaaggaaaattatttgaatctataaaatcagttaaattttaccttttcatttttactaatgactgcagacagaaagttgaaaactactgtagagctctttctcctgtaattgctgcttcagtagaaaaacctagactatcttaactgaatgttcctctctccttcaagtttctatgtaacctttagagatggattcataatttaaaagaataccattactgcggaaaagcgtattgccttactaactaatctcttctgatactgcaaagatatttccaaagataattcgtttgctttttcttctgtcttgacaaacacaacaataacctttcagcaaaactgtactaacactaaaagttctgcttattatggacaagtagcaagaaattaataactaaagaaaacaaatcttaccataaaatgttttattccattaactagcattataatgcaccaaggctttataggtacaaggatggcaaataattcttgccctttttaaaacaaaacaaaacaaaatgtggtaagactgaatgacagatgctaaagtttcccttgtgagtttgtacactctcatccatctaagatcttcctcttggtgtcatattaccctgtattcttgaggtgtcaagcccacccaggaaatttcctcccaggcctggggtcataaagctaagagtgtgtcaggacatagagcaggtagactctgacctccaggctctttgtggaataaacaccagagagaaagcaagaagaaaaaatgaaaagggccatacccatgctgtgcccaccacacttaggaccaggcagacgatcctcatggaaaacatcttttctaagggtggggctggctcctgaggagcactccagctgaaagaaaggattgctgccactcctagttcccatcctatttaaatctgcaagaggtttggttaatcattggctttgtcctgtgtagacagtcaaccctccctctacgtcctttgttcctcctatgctgttggtatcccagaaattcttgctcaattcccctcagcttgtttgcttccgataagctgttgcaaaggtagcatttgattctccagtcaacaattaggagatctcacattccaggaacagggtggctttgagaatgaaaagaggagcataggagggtatatccatatttctaaacgtgaaagaatatagaaggtgcttaggtaagctagctgtagcccccagtagtagtgatttagcaaacaatatttcactttatgcagaaattagggttgggtgatctggcttataaaaaaaataactttggggataagctggccctgaaggctttctataagtttatttagaacatattacttttctctatttaaaatattaagatgacagcagccccaggaacaaaacatcttgggttcataatccaagctgcaccacttccctgctctatgttcttggacaagttactttacctctttatacttcagtttcctcatttataaaataaggatgctgataagctaccccatgcttttatgaagaataaatgagttaattcttgtaaatctctcagaacagtgactgtcacataggaaatactcagtgaattatgggagatcataaagtgccatgaaaaataccatttatttcctgtttctgtgctagcaatctcatttctgagtgtatttccaaaggaaatgaaatcaggatcttgaagagacacctgcattcccatgttcattgtagctatattgacaatagccgagatatgaaaacaacctgtttccactgatggatgagtagataaagaaaatgtgtatatatatatatacacaatggagtattactcagccttgaaaaagaaggaaattctgtcatttgcagtaacattgatgaacctagagggcattatcctaagtgaaatgagcagatatagacagacaaatactgcttagctggtcgtggtgacaggcacctgtaatcccagctactcaggaggctgaggcagggagaatcacttgaacgcgggaggtggaggaggttgcagtgagccgagattgcatcattgcactccagcctgggccacagagtgagactccttctcaaaaaaaaaaaaaaaaacggaaaagaaagacaaatactgtatgatctttcttacatgtgaaatctaaaatagtcaaactcacggaagaaaagtgtagaatggtggtggccagggcctgaggcataggagaaatgggggagatgttggttagagggcacaaagtttgagctatgcaatataaataagttctggagtccaatgtgcagcatggtgactatagttgataatattatgctgtatatttgaaatttgctaaaaaggtagatcttaagtcttctcaccacacaaaaagataactatatgaggtgttttaagtgctaattagattaatagtggtaatcatttcacaatgtttatgtgtatcaaaacaccaatcagagagaagttcccctttaaaggaaaataaaaaaacaaacatccagctgtacaacctaaattatgcaatttttatttgtcaattatacttcaataaaggtaaaaaacatcttcagcttacatttaccagatgtattaggttggcggaaatagcaaataaaaataagagtgtcccagttaaatttgaatttcagataaacaacaaatctatttgagtataagtatgtctcatgtgatatttgagacacacttaaaatttttttgttgttcatctgaaattcaaactttactggacatcctgtactttatctggcaatcctaccttgcctcaaattctgcttcctacatgaagccaatcctaatagagtaatagctaatgtgtattgaatgtttactaagtcttgggttctttgctagacattttgcagggtacctgattcaatgtccaattaaaaggaatctcatgttctttcatacttccttagactgtgcaccactaatggcatttatcattataggagtaccgtctgtctcctccactagatcataaacttgagaattgaaatgttttattggtctttatattctccccaaaaggtgtgggccctcattgagcaagaaagcataagtgggttccagagatgcgaagttgcctggctgcctcccccagcactgcagacgtgtgaagctttctataaatggatggaagccctggtgcaaggcagtgcactgtctgctctatggaagactccttgtctgatcaagctcacccctgaagcagcttgctatgattttagagttaactgcagagcaaagaggaagccccagagccccatccaggttccagagggcaatgattccatgaaaagctgggttacactcactcacaatgactgcactggcaaaatgtcaggattagataggaaggtgaggcttgatctctgcacacattttcctatgcccacaagaagtgcccctttgggaggtgaacatggtatatagcaaagaagttcccgagagtaacctggtaggccttaggtgagtcggctgaacataatctgattgaaggtaaattaacagaaaacaatttggttgaatgccaccaccctagtgccatgtcagggtgtttccaaggatgccacctgagggctttatccttgcctctcagaatcagcacatctcacaccctttcttactcctggcctctgctcacatggcatctactcagagaggccttctctggccacctgatctaaagagctgccactctcgcatgtcattccattgactctgcttggtttttccacgcagtaccttataactcctggacaatgtgcatttgggaaggtatttgtttattctgtgtcttgcctacacaaagcttcctgaggccaaggcacaaggactggcacaaatgtcaggcatagagcaattgctgctcagtatctgctggagaaatggaaggctgtcaccatatggtggtgacaatgcatggtgggctttccagcatgtgagacctggattccagctaagtgacatgggcaaactatttaaattctctgagctataaatgggatgatgatatttgtcttacaggattgctgtgaagattatgtaaaatggtgtatgtaaaatgttggccatacacagcaggagctctagaaacagtagcttttattgttcctagaatatcccaatgctccatgataaaatgttcccttgttttgactgtagtaccaggagtccctaatgaggcacttctgtagctcactgtttggccccacactgcaggctgctcactaggctgggctctctgccccatgaacaggctgtattgtaagctttggaggagtaggttttgtttagctggaaaaccatgcaaattaataggcatgatacgagtatcattttttaaaaagcatgtgacaataagcgtatctttaaatgtgcaaaactggaaaaaagatggaagaaattttcagttgcttaaattataatctgccgtgcattggctttttctttttgagatggagtctcactctgccacccaggctggagtgcaacagcgccatctcagcttactgcaacctctgcctcccgggttcaagcgattttcctgcctcagcctcctgagtagctgggattacaggtgcccaccaccatgactggctaattttttgtatttttagtagagatagggtttccccatgttgaccaggctggtcttgaactcctgacctgaggtgctccacccacttcagcctcccaaagtgctgggattacaggcatgagctactgcaccaggtttgtctttttcctatagataactacatcctatttaccttagctctaatgagaaggatgtttgatatatctatccttttgaagttaatgtaatataaacatttaaatataaatgttaatataaacatttgaatgcaggaatttacacatttgttatgccataacttttggcatgactagaatagtttttactagttttaatagctttatttgtgtggtatataatgtatacagaaagagtagaaattctatagctatatgtttcagttttaaactatatctactcatcacagcttccacaggaaaagtaaaatatataaccagttatctatatatttgcaattgtataaatacaacttaaaaatacaaaacaaaacaacagtgttattttgaatggaatatttgtcttaccctgggctgacaccagaaattaaatgcattgatttctgagagcagctcactcattcactcatttgtctaaatttagcaatcatttatcctatgtatattatttctctagtcctgcatactatgtgcttaagataaaaaggcaaacaatgtatagtcttttaccttcaagttgcttacaattggcaagcaagtcaaatacgttatgcagctgagaattaagttaaactatgtaaacttgacatttttgtaggtcaaaacaataatatctacagttttatacggtttaatctaatataaaacaatggaaaaaatctgtaagctatatgctgagttctgttagaacacacagcagagagtgttatatcacttacgtattgctttttgttttgtttgtgtgagatatttcttaaaaagtcagatttaattcaggtctcaaaatacaagatgtttctgaaaaattcttatgtcatctatcataaaaatctacatgaatctgtacattctttccaaagacatttggtatcctaataacaagaagataatagtactttgacaggaactattttgttaaaacaatattaagtgcattcttggaaagtactaaaattatcttctaaattttgaaatgactaaattataaaaatttacaagattttggcatttataaatacagtctgatctgtaatgaattcactggacaacattggcaaagctatttaactttctgtagtttttttatttttcttttttttttttttttttttttttagagacagggtcttgctctgttgcccaagctggagtgtagtggcacaatcatggcttactgcagcctgaactccttgggctcaagggatcatctcacctcagctgcctgagtagctgggattaccagcttgtgtatcttattttctctatttgtcttgtgcacctcaagggtattgcaaaagtttgtctttaccaagctgcttactgtgaaaggtaaatgaactggtaggatgacctatgtaagtgtgactaatggagtgtttaatgtttattttcagaactcatcaattttctgacctcaaatggtttccccagaagttacagctgcaaagataaaataggaatttccttaatacccagaagtgattctgagttgcacttaagaaagtgaggaggaaaaaaaaagagctttttgtgatcgtgatttattctatcacactgttatttctctttaatctctttcttcaggaaagacacccattttattttttgtagttgaactgactttagattaatgaccacttaattgaataactttttatcatttttgagattaaaatctattctgttccaataatataataataattctgtttttatccttaggcataattttcatggtcttttacttaagcacttttaatcaagttctcattaagtagttatgagagtgtgtgtgtgtgtgtgtgtgtggagagagggagagaaagagaggtgaaagtagagtctttgagtttttcttactgttttatctcttttcatgtttaactgcagtatcaattacataattcatttttcaagattaatttatcttacctataatgtgcgtgatctagatttactaatttttggcacttaacgtatattaaaacttaaatgctagttttgaaaagtaaaaccattatacagataatcaattgatgtattaatatcaacaacatggattcattctcacatcatatctattaaatccatggtattcagtgcattgctggatggtctcactgtggttcttctagtaaagactggcaaacaaaatctaccggttggtgttggtttaacagtgacatgttaaaaattggagaaatatcatctgcaaggcatgtggaatttccacaaacaaggaattatatgaaaaaaaggggtaagtcaattaccaagatccatataattatctgtggtatttattgggccctatattaatggaagattttacataaaaattttacttagataaaatttgacaaaaagttaccaagaaaaacagtagagaaacctaaactgagggacattttacgaaattcatgactggcacaccagaacagacttccttaatttgtgaaggttgtgaaacgacaaagaaagactaagaaacagggaaccagaggtgactaaggagatgtgacaactaaaggtaatgtggtatttggatgggatcctggacagaaaagggacagtagtgtaaaaattgttgaaatctgaataaagtgtgaaggttacgcagtagcaaggtacctgagttggtttcttagttttgacgaatgtactatagtaatgtaagacactaacgttaaagaaaactggggcagggcgcggtggctcaccccgtaactggggccaggtgcagtggctcacgcctgttggggccagggatggtggctcacacctgtaatcccagcaatttaggaggccaaggtgggcacatcacctgaggtcaggagttcaaggtcagcttggccaacatggtgaaaccttgtctctactaaaaacacaaaacttagccgggtgtggtagcgggcgcctgtaataccagctactcgggaggctgaggcaggaaaatcacttgagcctgggaggtggaggttgcagtaagccgagatcatagcactgcactccagcctgggcaacagagtgagactcagaaagaaaagaaagggaaagaaggaaaggaaagaagaggagaggagaggagaggaggagaggaggagaggaagaaagagaaagagagaaagagagaaagaaagaaagggaactaggtgatagtctagtgaactctgcatagtacctttacacattttctgcaaataaaaacatgattccaaaattaaagctttatttgaaagcaaaagcaagcaaatattaaagttataaaattttatttccaaacttaacataattcaaaccccacacagcaataccaatcttaagagtaaaaaacaagagtaaaaaaaaaaattttgttttattgtctctgaaacagttacacatattatctcacttgacccttatcacagctttgtgatgtaaggaggacaaattatgaaggaaaacatttccagtccaaggtctcttaaatgttaggtcatattgtcttaatgtcacattttaactattcgtcccgaaatatttcaaagaagccactttcataacagagtggaatctgccctcctatgtttatctaagtagagtcaacatttagatttatttagtgaggattctctacttgcctcagttcacctcatgctttaaagttgccagtagaagaaaatctgggtgaggatctgagaaataggagtgagggccaaggatacggattttggatttgggaaacacatttttgacccagctgtagacatgattaaatgtcatgatcctgaatttaccacgatttcttccttcaaatatttcccaatgaaattgaggtgagcaagagcttaaaattgtgccagctacccttcccagaaagctttccaggttgctacagagcagtgttctataagccatggttgagtctaccatcaatgcccagaatgagccaatggcaacaataccatttgggccaaagctcatgtttatgataaccgttagtctatcttttaactaattttttttttgagacagagtctcactgtgtcgcccaggctggagtgcagtggcgtgatttcagctcactgcaacctcccaggttcaagcgattctcctgcctcagcatcctgagtagctgggacaggcacgtgccaccatgcctggctaattcttgtattttttaatagaaatggggtttcaccatattgcctggctaatttttgtatattttaatagaaatggggtttcaccatgttgcccaggctgttcttgagctcctgaccttgtgatccaccctccttagcctcccaaagcactgggattacagacgtgagccatcacgcccgtccccttctttttttttaattttttttttaattttttttattttgaggcagggtttgctgctgttgcttaggctggagtgcagtggtgcaatcacggctcacagcagccttggcttcctgggctcaaatgatcttcccacttcagcctcctgagtagccggcaccacaccattcccagctaatttttgaatttttctgtatagatggggtttctcaatgttgcccagaatgatctggaactcctgggctcaagtgatcctcctgccttggcctcccaaagtgctgggatcataagtgtgagccaccatgcctggtgtttttttccttctcaaagcaaaaaatattaacaggcttccagtatatagatcattagtggagaataattacaactgatgtacacttttatggggtgagttaattctgtaacaaacatttgttccaaaataatttgtgaaatctctctcctgagaatcaatatcatcaaaactatgttctctgattataatgcaataaatttagataataattaaaaatagaccgttgaaaaactcataaactttagaaccaaaaagtgttcacttcataacccttgggttcaaaaggaaatcaaggaaaattatgaaatactcagattgtagatagatcttttttttttccttttcattctgctttcaaaccacaaattcatgtgtggatagatcttaaaaacacaatgctgaaataaaaaagtagtaagtatgatgaagacttcagcagtgattgtcaaaggatttgtggtgaaggactagttttattaaaattctaatcagccacagaccaggtttttatagaattcaataaaaataattactaaaaaaatgaaatgttaaaaagcaatgatattcaaaatataggcccatatttttattatgagatttgaaagatataaaattctatctcagtaagtatatcagaacaaatataacataggaaaaagtttctccctgctaattctcaatttttgtacttagtgcagaaaagtaacagaagtttcgggaccagtattctaagtaacactaacttatagcataatgtcatttgcataatttaaaaatacatacacacacaaaaaaaccatgatttataagaatgcatacaaataaagaaacaaatatcaaacctattaaggtgattgtttattaaggggaagatggaacaaaaaggaaatgtgaataaatgagaatcaatcaatcaacagagcaatgagaatgatgtactgggagtgtggtaacaacttctgtctctgcacgcatacacgcacacacacacacacacacacatgcacaaacacaaagagataaatgaaacgtagtctttcccacactcttggtctctttcaccaacttatttatttatttattttgagatggagtgtccctctgttgcccaggctggagtgtgatcttggctcactgcaaccttcgcctcctgggttcaagtgattctcttgcctcagcctcccaagtagctgggactacaggtgtgcaccaccacgcccggctaattttttggtatttttagtagagacggggtttcaccatgttggccaggatggtctcgatctcttgacttcatgatctgcccgcctcggcctcccaaagcagcttattattttccatccactttgactcatcttactatctttaactttttctccctctttgagctacatcaaagtgataagaaatcaacgggtacacatatttcccacagggttaaatgtgtattttgttttcacccttttcatctgaataaactgaaggtatctattataaataccttggctagtttatactaattagaatcagagcaaaagaattttggatcttggaaagatttcaactatgctgtccatacatttattttttcatttctcgctcactttcaacccacccacaggtatgaaacagaatcttcacaggtatattttaaaatcttggtatttggtcaggaagtcatcaccctctctgttgattcaagaactctgctctgtagttgtatggtttaaagtcacagtatcactacacctgatctcttcctttgtagatgcttccctccataggtttgtcacggtgtaagacactacacatctgctttgcacttcgcctcactacttttcagtgactagagtttttctgtgtccgggaaaataaagaggagggcttagcaatagtcacctgtgatttgagctgtgaaaaaaatatataatctgtctctgggagaccccaaactctttttttcacttaaaaggtttttttggttgatttctcaacataaccctttcaattgccactttatttgaggagacatgatgcaactgagtctagaagggtttttcatgctttagttcttactgtaggctttcagtgctcaccgctggatattaataactaaacaagtagaattttgaaattcttttttttgtctctgcctcactgggttgcaaagtgaaccacaaaattaatatgtactcgttataacaagccaaacaatgcagagatatctaaagaaaaagttagtagcctctttctaccaatgaatgctggattattcaacatgcagatcaagcttgtactcaggatacctacaaaaatcaggagactcctaaatgtttttgaaagaatgctatatttgatatttcagaagaagaattggacaagtgataatgggagacatcaggaatctttagacttccttatatttattttgtgttttagtatttttttgtttttgagacaaggtctcactcactctgttgcccaggttggagtgcagcagcacaatcacggctcactgcaggctcaattccccaggctcaagtgatcctcccacctcagttttcctggtagctatgactacgggtgtgcaccaccatgcctggctaacattttttggtattttttatggagacggttttaccatttcgcccaggctggtctcaaactcctgggctcaagtgatcttcccaccttggcctcccaagtgctgagattacaagtgtgagccatcatgtccagccatgttttagaattttcatgtaattatatattgtggattggttgacaggagaacgagtatgtacaaataaggatatatgtcaagattatattttgttcatgaagtatatgtatatacaactttacataatttttattttagaattattcttacatcttaaaatttcacttattttgtaaatatttccatattcataaaaagctattgtgcttatataatccttatattctattttatttactaataagctatcttgcttgtccattcttccactgttaaatattttcttaatttcctactaatatgaaatttacatctatatttttatttctgtatataactattttcttttttaaaaatgattttcttgggataaatcactagagtgatattgcatgaaaactcatgaatattgtatatctctttgtagctatgaccagattgctcacacaaaggattttataggttcacaaagggtaaactgtatgcattctggctttagaagtggtttggaggaggatgagatggtagcaggagaggctggatgtaagaaagggaacaggaagtgggtgattgcccttatcctggcaagagatgtatctcaactacaaaggtgacaatcggtatacaggaaaaaagtgaatatgataaatatataggaggtgaattcagcaggcttgatgagtaattggatatagggaggtagaaattggatatggggaggaagattggaggatgagtcactgttttttttgcatttgaggactggatggagtagaacaggtttgggagagtggagaacactaagcataccatgtactatatccccaaatccaacacaatggctaccacaaggaaggcattcaataaatgttaattgaataagtgcttcatgcatacatgtatatatgaaggctgcaaacaatgaatcaatgtttctattttccaaagcctcccacgtcttcggttgtatatctagaagctgacttactgtttttatctcttcaataggatatcttaaattcagcactcctgataacaagaaagtgaaaagattaagaaggaaattgtgggcctggcatggtagctcatgcctgtaatcccagcacttttggaggccgaggcaggaggatcccttgaggccaggcatttgagaccagcctgggcaacacagtgagactctttctctacaaaaataaaaattaaagaaaaattaggcaggtgtgatggtgcactcctgtagtcacagctactcgggaggctgaggaaggaggatcacttgagcccaggagttcaaggctggctgcagtgagctactgttgtgccactgcattacagactgggtgacagagtgagaccctatatccaaaaaaaaaaaggaaaggcaagaagaaagaaagaagtgtgaaaagaaagagagtgcaaagccaaagctcaggacttcggaacaaccagacccacctcataaaattagccaattacttcccacagtcagccttttgctaagttatgtagatttagctattccttagaaagttggcgaatgaacctgaactcaggctgctaaaaagtcaatatccctgaatcagaaggaagagatggttccattcagctcacctcatgactagtgagagatagggcaaatagctccctaaagctctctgctctgagttgcagtcctttcagagtgaccaggtcccaccacaggtgtttggagctaaaaggttctgctgggagactccccaagcagctttcctgtctccagctgcactttggatactatgcatcttggttgtgtggctgtgactcctgcttagtgattatgttcttgtatagagtattgtcagtttgggttgctgtattttcctgtatttgtcctgtatctcctagagggcaaaagccataattgctatttcctttgtaactcccaaagagttaggcataacatttagcataaaatgaggactcaattactactgatggttgcccaattgtaattggtaaattggcaaaaagtggtggtttttaatggtcaataaaggtaccatgtatctagtcttaggaaacaaaaggtttattgaaatgcatgtagataaattatcatcagcataaaactgttatggagttttcaacatggggtcttttgctcttaaaatgaagtgaagctttgcaagtccattgtccaataggaaaaatattatatctctctgttcagataaagtcctttaaaaaagtaaatctcttttgaaacggtcttttaaacgtctccagcctgtgaatatataacaaaacaaaaaccatattaaaaagacataattttctccatttaaaaagaagaattaaataggaatgatttaggggtaataaacaaggaaaatacctgggaatttgaaactctaaaatgttctcctattttattaagtacatactaaaatatttgatataatgaaaataatttacgaagacaaaataaatgacaagtggtcataaaaatgcaaataaagtcaatcattttattattatatatttaggaacaaagttgaaatgttatctcctcaaataaacaatttttaaataactctgatatcagtaatttggaaatacagtcctaaatgagttttaatttccattgaaggctaaatgtccttaatagaagacttgaaatcaataaatatagtaagagaaaaaaggaagaaactttcagagaatttctgaaactttgtgggtcaatagaagttagcagttaattttctacaaatcatcctcagggtaaagtgagtcatattctgtttccgcagggtgctctggtctgacctgtttggctccccccaggtggtgttgctgtccttctccaattgtgagtctgttgaatgggattatcttcatagtggttttcttcatggaataccaccgggttttccaagtggcccaaataatgccattatcataaccattaggagtagatgcttttgagtaagtgccacctaaaacaagtcgtagatgtacatatcattattctggaatctttttacctctgcaagtctatgaagagctgtctattacgaagtgcattgccagttacataaaatttatagtattatctgctaactgaaaatatctccaaagattcctaaaatatcaatttataaaataaacatattattaaacaacatctgtgctgtgactcatagtcacatccacactttaaatttattcactactagtagggctagaaacccaaagttccctaattggcctctgtccctaagcttatccatcccggactcagctgctgtggaccatctttcttcaggcaggttagaagagaaggagccacaaaattcctgatgaggtcaactcaggttatttgaaagcacaattttgttggttgattgaggagctttaggaaatggttctggcatgttattttatgtctccattttaaagtgcagcctctgttgatttgccttctccttgtcctagggaagcagatctcatgtaattctgtaaaaggcttgtcagagcacaacactggcatgaactacagctctggcatggcgccccgggtcacacagatcaagcattttcccttagagtttcttctcattatgtggtttgtgagtgcaaagataagttatgtttctccaatttaaaaatattgtgaaaatcaaactgttactttaaataaactgtgcaaagtttcctagttggtgattggctaggacatcaggaggtaaggttgctcatcttggtagatgaggagactatggtttgctacaagcccggagtggtttggaacactggtttcactcatctacccagcagatatggtagggaagtcctactgatgctaaacaggtctggtctgactgtttggctttcccagggtggtgttgctgtccttctccaacggagagtctgttgagtgggattatcttcatagtggttttattcatggaataccactgggatttccaaataatgccattattgtaacatggatcctttagcatcggtaaggcttccccacacataactgctgggtaggtgagtgaaaccagtgttccaaaccattccaagcttatagcaaactatagcctcctcatccaacccccatcctaaaataagtgtctactgtcctcagactggtctcttctctcaagctttcacaaacccctgcccttaccagtgcttgccttctctttattctgttcctccaaacacctgttcactgcgtgtatctgacacaaagctcatgggaagccaggttaatgtgtcaacaagcatccatgtagtaatgttaatccatccagatcatttatgttgtatgtctaaaggagatcccacaacccacagtgccagctatgatggtgatagtttcacatataatgccaaactactggatattttgcagcaggtggatttctttagaagggctaattttaggcatgaacttggtattatccacttccagtttcaaagaacttagttgaaataaagaacatgataaaatccctactatctttataaattattcttcatttcttcatatctatttattattttttatgaaaatagtatacactatacattaacttggaatctaagaaaggaaaacataccttggtaataaactccattgagatggccagcgtgacacttgttcatccaccaaccagatccatcctgttcagcacagttgccttcaaacttatcattgtcattgtcccaggtactgaactgcatgccattatgggatgtgaaaaacttgtcactaggatcatcgccaaaatcaaagccatcaaaggcatctccagcatccccaccagcgaagtaggcatatgttaggcggtacttgtcagcttcaggtcccaccttgaacatggcatagtctgcagtactgagaagaaggaaatacaaccatcacatgctgaccctcctcagggatctcagaagttccctctttcgtaggatgcttccttggaatttttgactttgtttcttaaggctgaaatttgctcattgagtgaagttttttgcaaatctggcaagaggcaatagatatgtgaaccagtccacagctcattaacacttcccgggatgggcctagaagcctttgaagcatctctgaaaactaataattgcactcacttggatgcttttttgcttgtttcattctaagatcaaatccagatgtgtagatgactctaatttcatattttctacttttattgaaatgttatgtgttgcacacacattatcatagatcacagaaagtatctgacagtgagtgacccttaattattgcacaaaacttgaaggaggtacagttccattagccactcatagcacctgaagggttaggtgctaaagggattttcttcctcaaatcagtgtggtagtggcaagaaggagagcttctgagggcattacacaatcaaagtcttccctgtgtggtccaaagcatgtgagctgaaggagttagagagattctttcctggaaaaaattgtgcaagtggacaacacttctatagagtgggggaaaggatgggccttaatgaatgaacagaaatttccagaaaatatttagcttattttctaatctccagtggctgggaaatggaaggtcctttcctagaagaaggtctactgactatagcactttctggattaaaaaccaaccaagcaataaaaaaaagtccatgtgtttgaagacaatatatttcactattccttatacataacaagagggttggatatttttctgcattttaattaggtaacaatgcttaaaaccttcaaatatctcaagcaaaaagaagcctctagatcatcaaaagagctagctggtttacttttagggtagctcatgatttgacagaataaatggccatcaaggcactgagaagtctgaagaggctgtatttgcttttcaaccaggatagttgttaagaggacaggctctaaagttaaactacttgagtctgaattctacctctaccacttatcagcaatgtgactttgagcaagttaatctataaaatgggattaataataatacctgcttcatgaaatagtaatttagactagataaaattataattttatgctcaattcctgggactgattaaaagttcagtaattagctattactctgaatggttccagggtaattagattgtaccaatacacttagattcatcctgaatagaatttacctttttggattgcccaagaaccaaacagactcctggagaaaatggtggctggatgtgctgtttgcatttgtcaggctgcatttgccattgtctattgatagttggaaagtgcacattccaggcaatctttacaataaaaagttggaagtcatttcaaaacagtacctggttctgccattccagtcttccagttccactcttaatgcatatgggatggcagactgtgtgcttatcaaatgaatcttctcatttcccagccaaaattctgttgtgccagtaggagacagatgtccaaatccttctttatattgaatccagtttttcttgaaatctacactgccatcaagtctctaattacacatttgcaagagcaaaaggagaaaatagactatcaatgcatgtaaagagaatgctgtcaacattttgtcaaaaatacagagcactggttctatcaactcccaactaagtgatcttggccaagctacctcagtttcctcatgtatcaaataggaaaaatgatggttacttcttagggttgctgcaaggatcatgagagagaatataagagaaatacttaagagggtttctggcacatcataaattctaaatgagtggtaatattaaaaagacacctagacgacttcagaactctagctggatattactgattcttacacttatgatggaacccattgctcaatcggtgtctggcaactaatgcttccaccattcattccctctgagcgccccctgtagaaacagttataacagtggtgggaggtaaacagaaagtaaaggagccaagattcctagtgggtatcagcaagtggcagatgcaacacaggttccttgtcttggagcagcccaagtgtatcctctggtgtgtgaaagggtggtgatggtggtggggtggtggggggtggtgttgggcttcctcatcttgtgatgggaaacctcaggtcttgacctacctgacaaaagagtttccttctttttatttgtcactgtggtactatgattatgtgccaccatgaatctacaaagtcagtgccagtacaatatagagtcaagtcacaaactctgaaactatactgcctaggttcaaatgctgactctgttgcttattagttatgtggtcttgggcaagttatttaaccttgtgtgcctcagtttccttttctgtaaataggagtaacagaagtaccttcctcttagggctattgcaaggattaaatgagctacggttcacaaggtgcttagaaaagtatctgccatatggcagaaacaatgtaggaatttattaaatacacatggtggggaaaaaattaccttctgaaacacagtccatccatttccagacccatcgatttcacagtagactaagaattgctggttagctttcagaggtttaataaagtaaagcccgctctgtttagctcccttattggcaatgtcttgacaatctagagaaggagaatcgacttttactgtggtttgaaatgcaggtaagactgtgccagccttgaaaaatagcttttaacatgtagtaaactattcattttccaagaataattttcttacttttcacatcagcattccttttaaactgttttttttagctattcaagaaaggtctagacaactgaaattcttagacttaatgggtagccactttctaaactattcctatactttccagtacatactttctcctttacattacttactttgatgaacctaatcccaatataaccttcatcagttacctttcccagtgatatcatggatttgcaccgtgtctttgcaaggttcctggcactgtgcttcaagctgggctaccttctctttcaggttaacaatcttttgattatttgaattatatatttcctgcaaatatctacaaacagaaacataagataacaaaaataagaagacaaaaataagtattcctttcagaagagtaattttatattttctttggaaactgctaagtattttcttaagaagtgctttctgataaattattccattcttgaggaaaatgtaaaattatattactaaattaacatgaattaaaattataaactttttgaaaaagaaaaacaaatcaaaaaatcaattaaaacaggaatacaatgtggacctgaatctttttacttagaatggggcatattgtctcaactcccaacacaaataacaaagtccttgtcaataagcaaatgtcattgacattttgctttttactttatgcataagggacagcagatagcaacctgcaagagtggcgggactggttaataggaacaccccctgatgctttagaagcaggaaaagctcagttcagtaattcacatgtgctgaaggagtatacctttcacttgtggatctactgaggctatacatataagcttcaatctaaaatataacttacacagggacatgatctggaacgttattgtatgtaaaataaaacaacagatacttcccctttcttctttaatgcttctggttacatagctttgggaatggactgggggaagtaaaaaccctccttttgtagttacttacagggtggcttgcaaatatccaaaaatgatagaaaactgtctacaatgcataaaccgttctttctttgaagtaaaaaagggtagacaaactatttgtccacgttttccctctaccttgtcttaggcaatttctgtacaataacctccttcaacttcaatgatggacaataataatgcaagtaataataataacaataataacaagggccctctgatagcaaaaagaggagaaatctttcctgggccacttctccctagctactatttatctcaatttctcaagctgctttgagaaaaattcagaaaaaaaaattggggaaaaatattaaaactgtatctgagaccttatgttcagaaagtttatgagtccctgagaagctttaacagagacattcacttccaaatgaagggaagagactatgcaggttcattctgcaatgatcaatatgagctttgcaatatttgccacacttagtctctcaagacatgtttcttcctgctccacattcaatataatttactttaggagccaaaatccttactatgcctctgcttgctaatttttttaaccaccaatttgtcagcatttttataaagaggattttattttcaacacccaaattcctatgagattgattttatgttgtaagataaatgggggatggggaaaaaatttttgataaatatggtcaaactagcatttgaagacatctagaacatctttcttcaatgtgattattaataagcaattataacccagtataatttatattgcactaaaaacttctatctctactatgctcaacataatcaggcataatgtcactgggatattataaatggggaaaacacattaaaaattactttcactcaagtatagaatattaaataaaaactaaatcagtcttgcagagcaaattaaaacaaaaatccttaccgaatacttgagtcatgtgttaaaatcgatgcttcatatttcataatttcttctaacattttcctggacttcaaagtagcagcgtctatcatatctgtaatataggatcagagacataaaaatccttaagcaaatagaacaactaaaacaacagcaaaagaacttcacagattattattattattttttggtcagtagtctttattttctcacttggttttgatgattcatcaggattataagtgagttggattgcttttatcagctgtttgacttctgatgttttgttttcaacttgatgtaagatgtcttccaaagactgtagatccttgtctactttggtttgataagtagacaggaaatctgcaatgccacaggtagttggacaataactaccctgaaaatataacagtgattaaaaatgtagacagatgctactcttaaaatctattaagaaaaataggtaaaacctagactatgtttttaaaaagttacaagtgccagatgatatttatgagggaattatttctattcctctgcccctctccagttcacacacaaagggagaaacataaaaactacttacgaatctttcatctaagatgcagcagttgtctctggtagcaacatactaaaagagaaaaaatacagaaatttcactagtttattatctgttttattttccagctttccattttaaacaacgttttgtgaagagcacacttactgctacacatgttgaagagagaaataaaagagcatagaagtagagaattaaattccgggggtgcaaggaccaactcatgatgtctgagtgcccggagctccgagccttgtagtgtcagcactgtcacctctcaggctccaattgtccctttatgtaagctcctgggatagccaggactgcaaatggctggagctgatcacggggcctccttaccagaagggtgggcaggtctttcccgttcctttttcctcatcctggcccccaacctatactgtcaggttcccagattttgcacacaggttgaagctcctcctttttggcccagctcaaggttttttctctgatccaaaattatctgcaaaggctagtgaagcattatccattgctgtgaggaggagggcagtcctggaggctgtgtgatgcaacttcttccagtacatggctgagagcaaacagatatgacctcgaactaagcaaacctagtctatccttaagatgggtcctgctgccatcacctgaattaccaaaagaactttcttagcttagggatcagttaacactattattttagcctagggatcagttaacattattatttttaatctgtggctgtggcaggaggagactgacttcccccatgtcccagttcactattcccaggaatgaatgaccctggaaatacattcctgtccctctgtgtcaaccatgttcataggctctcacttctcagggagcttttgagctcaatcttccctttgtctgaaggtgggcatggcaccccatctgccacagagaaaagagccaggagcccacttcattgttcctgtggttccatcaagctatctcagagaagagaaaaatccacctcccttgtatctaaggagagtagaggcatagctgaaggaaggggcaaaatgaggtgctggggaggggccatcatttctgtttggcccttacagcatccttgtgtttgggaaaacatgtctgtcatcactgcctattgagatttatcactgggcgttacactattattaatgtctctatttttggttatccctcatttcttcctctggaaccaagcttattataagttttgatgaaatatgttagtgggagaaatgcctccagtttgaaagaaatactaatactttaattctgtctttacaaaggtatatttattgactcaaaaacaaagataaatattcatattcagtaaataatcaataattataacaaagtgaacacatcaaaaccagatttgttgcttttcttctcctccttaatatatccctctctgacttagcagttattgtcaatcatatcaccataccaccagccaattaagtctcacaatctttctcatccatcttttccactcagctaatcagttgtcaatcaagtcagttgaattaaacatttaagtattagtattctttcaaacagctctacctcagatagcatttgtagcaaccttatattatatgtatacatgctgtatccactgcattagattgtaaactgatttctgtggctacggcatctaacatatatagctgtacttaacatagttgtagttaacactcaataactatgtaatgacttgaatcagttgcctctgtgaagaagaatgggatgcagaggtggaggacaggattggaaaaaaaggctttatttttctctgtaaactttctatatttagaatgttgaatgtatataaatattatctactaaaatatatataatgaaaatatgtaattattgatcattcacaaagatttacatagtacactgataattacatcttgctaactttttaatatgatttgaacatgaaaggtgactcaggcattgcctttgccttcaagaagtgtgtagctcaattggagaatgtataaataaatagttgttaaggctctggagtccatctccctaggtttgagtcccatctttacaatttactggctgtgtgattcagtacaagttactcaatctccttgagttccattatccatgtcagtaaaagagagataatacttatgatatggtatttacttaatagggctattactaagatttagtgggataatgtgttgagcacattacccaattcatggtaagtgttaagtaaatgtttgtaaggtttatgaattaccaaatatatttggtataaaatctatgtaaataggaaactcttttaatagagctattattggtagatttggttcacagggaacaagctttgttgttctagctacagaaattctctttaataaaaaatctgttgcaactaactgcagtctccttctgtaagattccccagagaagaaagcacctggtcgtttagtttaggaaattctatccaaattgattttaccaatcaaagatcaaatgataatataaatggattgcatgccttgtgagaaggtatacttcctatctgtaagaatgttcaagcaaagtgtgtttagacagagcatgtctttgtggttctttttgctgaagaccataaaatattagtttgttgaatttagggtaacaattcatgcagccacaggttgggttctgagctccttaatgtcataaagtttcattggttgtgttaagatatataatattcacaaagttgataaacatttaaattgaggacattagaaattctatcttatcccattttagaagtggaatacttgtattacaggcttttaactgacttatattggaatccagatgtgttatcacaattttagagaaaataatttccttttactacaatctcaagtcctaaatccaaatcatataagacaagatgcttgctctctgagaaaaaaaaatggtcaacagtgatttagcggtctacattggccctgcattcaatctagtatcacttaggtttattaaattttaactagttttttcatgtttgggccaattttttctttgaaaaatgataaatgattgatgaattccaggaatgaagaatgtttcttaaatcacagttcttctacttccaggtatgttttttgagataatagcataggtagtatttaagccaaaataatcatttactgtaactctgaggtcagtgggcttgtttattgaaataataatgtcccaaattccctatcgtccaaccgtttgtgttctgatttgaaaacacaaatctacagctaacagtcttcgtgtatattggtaatttactctgtgagccaagtctgttacattcatctttgctccaaaattatttgctgaatttaaatttgattatgtagaagacttcttgacctagtgacaaatgatatagccctaaggaataatagaaagaactaccaattttgagcatcttctttatgctagatattatgtggtagtatagtttttgttgtcatgtatattctctcatttaatcctcaccacaagcctaggaagtagatataattacctgtatcttataatgaaaaaagaaaggcctagagatgttgtgtaacatatgcagggtcagtgtgccagaacaggaactcaaacccatggggcccaatgcctgtgctcttaaccatgaatcttaatacaaccatgaagcccttcttaatttaaaataatacacagatacaaggtgttatgagactcaaagttattcactgatagaatggattttaaagatgtgtgtgtgcatctacataactgtgtgcatgattatttgaacacacatttacatctatctaccaacttatctatcttcttctctgggttagagacaagattttgtgaatgatcttttacagtctttgagtatttctcaaacctagatttgtgttgttttatgattagcttgtgtttatggtccttttttttttttctctctctttagagatgcagcctagctttgttgctcagtctggcctcaaactgaactgctgggcccaagtgatcctcttgcctcagcctcctgagtagctcggactatgggcacgtgccaatgcacctggcttcagtccaattttagatggaagcagtttttcaatgctaactgcatggttcaagtttaataggacttgataaattgaattccatcagtaagttaaagggagagacagccactgcgtggtcaaggaagctcaaatcaatggcgacaatgatatatctgtttttctaacaagtaaaccatttctagatctaagctaaatttatagcctgaaccctcagaactggatttcctaaaaactggcagaaagaaaatgacctattggcatactgaaagccagtccaacctaatagtaaaaatatcccattaagggcaacagagttgtctgttagaatatttgctttgtgtataaaaatagcccagggaaagtgaaaacgcaaaagtttcttggtagtctgtgaacaatgtgcttttagtttcactatgtaaatcaaagacaaaaacaacattgggcacaagtaaaatggactccctcactggcagcagaacagcacccacaggttgagttttgcacttcttaacttcataaagtttcattacatgtgtcatttgggggatctgtcctagcggcagggatgttgaaaaatctctgctgtgattggaatttaggaaataaagtactgggtgcctagagaaagaaggattatcccattggcaattacagaggccaaagaggctggaaattagccatttttaatactagtttgagactaaggaatgatctgaggtgccctggattgagacaaattgaacagagaagttggatttaagtgttttgctgtgccacattggtatctgctactggtttgtttgtgtttttccatctttgtgtaatctacgattttaaatctctcaccccatgaaagaattttcatgactaaatatgattagcaggagatttacaagagcaaatgagtttggggggaaaaataaaccaccaccaaccaaggggccaagttatattcacaagaatgtgctccggaaagaagaaactttttaagcctttgagtagaaatactggcctatgttgaaagtggacaggcccctgtttgagaaaaactgtagttattttgtcatataaactatctttggaggaatatatatatatttctaaagaaggagagaaaataagaagaacagagaatgctatcagatcatcaaagcaattcagtcatcttatctagcttaacgcacacatttgctttaacctgcaattttgaatgaggacaaacaaaacatttataagatttagatctttgttttaaattctaactacttgggttagtttattgtcttagtgtaattgcactatagtcctttcaaagttaaatccatataggatttgctgtgtacaaaggctaactttctattgacattttgaaggactttgcttcatccatgaaaggtgacatatctctgtcttcttcaagtgtagatttctgtgtatactttaccttgagtggtggagcagtgacctctactaagtaaacaaagatacgatttgcaaaaccagattaagtcaaagacccaaatatttattgaatgttgtgcaagaaagcctagagtgtaaatcacactcttgatggataacactatggctgcaagttaccgaagaatggtctggcttcagggctgaccagagcaagctcattcacaaagaaacaaggttaggtcaaaatttagaacactgcattttaccttttataaacagcagagaggaaattctgttgaccaagatccaggaaaccgattgcttaattatgcatccttctgcgtcggaaaactacctgatatttacatatcaatacttcctgtggatctcactatgctttataaggttaatttcctcattagtactttattgatatttaatactacatcatctaattatggctatggaaggccccatacccctcctcatattaacctgatatgttaagccatttctagctctgaccgagaaactttatagaatttatctaggataatatctaaaataatgctgaatcaaatatgcaccacaaaatttggctgccgggtaactgcacactgtcccatggtgttcctctgctggatgctcagatcaaagtggtcattcacttagtaaatacatattgggcatatactatttgccaggccctgttctacacaatgaaccaaagtcgctgctgataagtttacattctagtggagagaaagaggatataaacaaaatattatataatgtcagttggtgacacgggctgtgaacaaaaatgaagaaggattaaggaaatgaaagactagaggaggtgctgttttagatatggtggtcgggcagcactctaggttaaggtgacatttgctgggtttctggtgaggctagttacaaagctcatggctggctcactattgccacctgcaggccccaatacatctggaggatgaatgatttaaagccaacagacacatattttttcatttagagctgtcagagatttgacaagtgtaggtaagtaatagaatgagaagtatactaagagaggaacactgcgcaagttagccagaaaataccacaatgaccatctacacattactattgagcttgcgagttatgccattctcttcatcaaaatcctctgaggaattcccatttcctgtctaattaaatataaacttctcagccttgtatttaagcttctccaaaaaaaaaaggccaatataacttgttaggtatatcttataaattggattgaggtagcatatcccataaaatttcaaaattttgccttcatgaggctgacataaaaggtattttaattattatacaattattattatataataccttaattaaataccttcataatcatataataataccttaattaaagtaaattttatgtaagcctcatgaaggcaaggatttttaatctgttattatctgtggtgcttgatcaatgcacccaataaatatttgttgagtgaataaaatatattttactaaaatattaagaattactaaatattactaaaacactaacataaaatactaaaatgcagtttgaggcagagaacatgaccattaagcagataacaaaatcattcaagaaaaggaaatacacccatttcaaaaccatctgtttcagagcaaaaatctgtagcaaggcaatcagatctcacagtgtgggtcagtgatagagctgatggagagtactggggagggaccacggtgatcctcctgactccatttgagtggatcaggagaggagcaagacattcaccgtgattttttgactgaaggaaactttatatgtatttaatttttggaaaactaaagcaaaattgtgtcacattttaaaacaactccaagtttgaatgataaacataaaatagagtgggcaagtcctagaatatcacaacactaggaggaattgcctagagccattggtcactgtttctcctgatttgctttataaactataaggagagaaagctccacataggcctctgaaccactcctgcttgactggaacaggtgggctgccctaaccaaacagtacaactttaacaaaggtcagtcaaatcctagaagatagggaaatgagggagtttatagcattgtgttgtgcatattctctagaatacgcagaactagggctagaatgtgtcatagagaaagccaagtaaccttcacctggccctttccttaggtttgtctgtcttggtcccatgctttagctcagctcactcagctgtgctccaagtcagcaagtggtcatgacctacatttgggacactattgcaggaccttgtgtcacccactgcactccatttctcaactagaatttgccactgggcctcaggctgccacagcctatggttactgtcaggaaatgcaccagtgcattccagcctggccccagcacccagccctacttaggtttgttgtggtcccttctttctccattcaggaatccctctctacttcctgctctcccaatgacaggatctggtaaactcatatgaagtaaggtaggaaagactgagctcgcctaaggtattacttctaccaagactgaaatttaaacttgagaaaaacccggaaactgaagacatcagaatctaaaaagagaattttacaaaacagtcagctattagaagagaattatgggatcaaatacaaattaggtaactaagagaagttgtataaagccatttaatgacgtaaagacgttttatttctattttaagtacttagaatttcttctaagcgactatttcttaaaatgctccttagattactctgtttcactttgttaaaaatgttaggttcctcagcccctttccagatctaccgaagaagagtatctgggagtggaccccaagaatcttcattttattaacaaacttccccagatgattattatacacagtaaaataggacaaccactgccctacacaggagagtaaccatacctgctttacctaagaaggccttatttccattagacaatctcaaatcttgtatacttcctctttgttagagtatttaatactgaagatatgccataatcatttcttgttgcaaaaagaatttaaaaaccaacggtatcagtttttttctattgaagtttaaaattagattttggtaattcagaaacaaaaagacaaatacagcatgttctcagttataagtgggagctaaaaatctgcacacatgcacatacagagtggattaatagacactggagactccaaagggtgggagggtcggagaggggtcagggatgagaaattacctattgagtacatgtacatcattccgatgatggttacactaaaagcccagacttcaccactaaaccatatatctgtgtaacaaaactgcactggtaacccctaaatctatgaaaataaaaaacaaaacaaaaacaaaatagattgtggataatccagtttaatgatgcatattgctttattgatgaatatggcatcaatgctgcccaaagaataaaaagtagactggccccaagccccagtgccttaacacattacagaagtaggtgttcaagaaattcaatcgctttacagaaatagaatagaaaggacttagggaaagactgaatgaacacgtaggagaggggtaaaagtttcacagataataactctgagaaacagtaaatatgggagaacactaacatgaataggaaaacaagaagaggaactggtctgctgaagagagaaaatgaagagtccaatttccaacattttaagtttggatgggagtgagacctgtaagaggagatggcgtcagaatgctggagatgatagagctttgggaatgagaactagtggtgagctgatggagggtgaagtgagtttccaaggagaaaacaacctgaggacagaatgtggactgaatttaagagctggcagaacaggcagagaggggaagaatggctctgactctacctcatggccctgtgcctacacaaaagccaaagactttcatatctccaaatgacaccgcttggatgtgatttagctgtttatctgtgtcttggaatgctttcaaatgaaagaattataaacagtattttatatatatatacacagatatatgtatacacattatatatacatatacatacatatgaaacctttgctgttagatatgtcagataatacagaatgagtggtaatcatttaacacatttcatgttctgtggtgccagaaatgggtaggctgtctagtaaatagattttgttaattagtacattctgtgatataatctagttgtgctgaatttcctgagatgcttggaggaaactgttggatttcattgtgaatggatttttatgttgcatatgtcattacagattttgatgaatacatagggtttattagggctaattcaaaccaaaattcaaataatttagaaatatagtactctattctagctgggtgctgtggctcacgcctgtaatcccagtattttgggaggctgacgtgggaggattgcttaaacccaggagttcaagaccagcatgggcaacaaaacgagactacaaaaagtaacaaaattagatgggcgtggcagtgtgtgcttgtggtcccagctacacaggaggctgagacaggaggattccttgagcccaataggtccaggctgcagtgaactgtgtttgaatcactgcattgcttttcagagcctgggtgatagagtgaaaccctgtctcaactttgtctcaaaaaaaaaaaaaaaaaagacaagaaaagaactgtattttaaggcactttgttggaagcccagtcctctctaatggttagtgtaatacagccacctgctggtgaagttattgctagacagcaacagccacttctgtggatacacctgtgcactcaaattgccacatagattcttgtagattaaatatcccccacctattctttttgtatgtgtgtaagttcttatccatatgttaggtttctctgtttttgtgctgaaggggtggtgaagtagatatttttcttagtgtcagtcaacagcatttgaaatgggtcctcaggtcaaaatctgaaattcagaatttgggattctctgtgtgtttggaggtacttccaacctagcagttagggtataataaatgacccccaaatggcctctgtatattggcttctaagctgttgatttttttttattttttccaatttattattattattttaaaggataggtgggggtgggggctctcgccctgtcacccagcctggagtgcagtggtgcaatcatagctcactgtaatctccaactcctgggctctagtgattgttcaatctcagccttttgagtagctgggactacaggcacacgccacaatgcccagctaattaaaaaaaatggtaaaaatgggatctcactgtgttgccaaggttggtaaggttgttgagttttgttttaatggcaggttgtcaacaagtcaaatgtttatatatcttaatgttttaaacacagtccaaataaacagattttcagctatttagaaactgcctgctctgtataccctgagcaactgcacccaagatctgctagccatagataagataaactttgcagctaaaaaaaccccactcagcagctgccctttgagggtatctgatcctgagattttgcagtgtgttgagggacgttacctaaatacagaagtcccctctctgattcctcttcttcagggcttcctttatcctcctccccttctgggtggtggcctccatgctgccagagctctggatgggtccacgctgtgtgggactccccctcaccacgcaaacctgttaaagtgcttccaaaatagagctcattgtgtgctactcccacttcattattatgtttttttccttgatcagcctcaaaatcccttgaaaaactcattctatcaggtgagaaaggcctcacctcagcagggagaaagaaatgaatgtcataaactctggtaactctggtttttcatatggtcatggccctaagtttccctctgtgcctcttcttcaattactgttgttcccctgcagaaagcaacattatttcctctaaaagggcaaagattacttggcgatactggtgcctctagtcgtcccttcccaaagcgtccaggagaactggtcacagaagggatgagagcgcaccatgtgccacaccatgtgccacaccatgtgccccactgtggaggctttttttttatgccttggcctcctaagggaacagttgtttcagctgtaggtaatacagcgggaccttagtctggccctgagtttggcgaagggctctttatgctcttggcattgctagtagagtgcaggaagggaggagctgcttaaacagacagttcagctcaacgtcaggccttgactctcagggactcagcctgaaacccaggtggatcattcagggtactctagagggacaggactaataggatagatgtatatatgatgtatatatgaaagggagtttattaaggagaactgactctcataatcacaaggtgaagtcccacaataggccatctgcaagctgaggagcaaggaagtcagtctgagtcccaaagcctcaaaagtagggaagccgaaagtgcagccttcagtctgtggcctaaggcctgagagccccggcaaaccactggtgtaagtccaagagtccaaaagctgaagaacttggagtccgatgctctagggcaggaagcatccaatacgggagaaatatgaaggccagaagactcagccattctattccttccacattcctctgcctgctttcatcctagctgcgctggcagctgattggatggtgcccacctacattgagggtgggtctgccttgcccagtccactgactcaaatgttaatctcctttggcaacaccctcgcagacacacccaggatcaatgctttgcatccttcaatctaatcaaggggctggatttgtttaaccatcacacaaggggctgtttttgtttttgttattgtttaagagatgagctctccctctgccgcccaggctgctgtgctgtggcacaattaaagctcactgcagcttaaaactcctgttctcaagcaatcctcccacctcagcctcccatgtagctgggactacaggcatgcatcaccacgcccagctaattttttaaattttttagttttgtagagatagggtctcacaatgttgtcctgttagttgcctagattggtttcaaattcctggcctcaagcaatccttggactccccaaatgctgagattataggcaaaagccaccaagcccagctgggctcactaattgaaggttatgaaagcatcacaccctttttaggcaatcccttctccctctgtatggctgaatgtaggaaaaaagtatctccctcccatggttagttaaggatcagactcacttgttctaatcttgcctgtacaagttagtagctctgtgttcctggactattagttagcctctctgtgcctgtttccttttatcagactgacttccttgctcctcagcttgcagatggcctattgtgggactcaccttgtgattatgagagtcaattctccttaataaactccctttcatatatacatcatatatacatctatcctattagtcctgtccctctagagtaccctgaatgatccaccaggctgtcggggcttaaattccagctttataacttacttctagctgtgtgaccttaggaaatgttcctgcttctttgtctcaatttcctcaattgtaaaaagggaataatattattacccatcttatagggttgttttgtctaatgtgttaataaatgtaaacatttaaaacattacataagagctgattttactattattataaaaaagctcttaaaacagtttctggtcagcattaagaactcaataattgttaatggttaatattagtcatgtaactacccagataatccataaactgtattagtcatcctgttaagaagcaaggcctggtttgtcttcttccttttattatacaattttactgcttctaatttaaactcttgcctccctaagttcaatccaggaagagagtcaggattaaaggactagaaggaaagacaagagtgctgatggaaacaaaactactcaaatataggtgttaaagagagagaaagagacagagagggagacagagagagagagagagagagagagagagactttgtcagctaaaaattaactagactgtcagctcctgcgtcttctgcatccctctcagaacctggaaaaaaatatttgcagtggtcctgatgtccgcagcaggccttgctccgatggttttgcagagtagcaagtgaagatttccaaaaggcggaagagcgggataagagaagaaaaagagatagataagctagcacaggaacaaggctcagagcaggaaagttaccaggacagaacagggagggactgactgtcacagggcagggagcaggaggaaagaagccacttttcagtgaaaggtatttgtaattacaagaaagccaggttcttcagggccctggagaaacagaaatacaattccctggcttctggggagagcacttaggggctcctatatcctcatccctttggattttcccttctcaaacgccagaatttggaaaagggtggggagggtctttaaattatttggcacaaactccgaaaaagtggagaggctgtgagccagccaccctccgactaggttttgtggtgatggttgctgaaatcacttgcgcacaggatgacaggagctgggaacctcaaggtaggtgagcctgccaagacgcgggtccgggactcggctggggcgcagatggagcccgcccggtagggggtgtgcggagccctgttttctgggctccggcccccagcccagcccagccgccgcaggagcgctcggccagtaggtgtctctgctcctcgggcggccttgagcagtgcctaacgttgagcgtgaggctcgtgctccgggtctcgcgggcggccgcctcgggcgtcgagtcccggagattggacagacaccagagcctggggaccgcggagtgaccgggtggggctggagggcggcgccgcgccttctggggagacgcggaggtatcaggtaatcccccggcggcctgcgccaggcagtcatgcccacccgagccctgggacctttttcacctcctctttccagggaggaaaggcggcaagggaggcgcgaggagttagttgcagccctggaggcagacactgaactccaagataatgccacttggactctgaaagtgggctcttctctaccacgcgatccagcttagcttttaccttttctctagaggtagagagggccgggtgccaactccttgctcaacttctcactggaaaagtggctgccttcctccgtctccctcccctgggctccggccaggggagcaaggcctgctgtggacatgaggaactccctgccctgtcctggtaactttcctattctgcaccttcgctttgctagcttgtctacctccttcttttcgctagcttatctacctccttctcttcttcgctcttcctcccactggaaatcttcacttcctagtccgcaaaaccgtccagcggaggtttgcaacagagtcggctcttggaatcatagccctcttaggttggtggtggttgtggattagagggcagcagtagggacgattaaaagtagtttttaatacttaaatggtttagggctttcctgtgcctttgttctgcctaaacattagtttgatttactaaaatcctctcctaccccatttctggcatttggtaaagaaaccaagtgaaggtaatcaggcctcgggtatttatgtatgtagaaatcatctagcaaaatagaacgaatagatcatttcttttgaggggccgtaaacttttttgtatgttgaagtgtgttttgatacttgggtgttcccttgttgctgtggctgcctgtttcatttgatttgagggcctttgagcattgtctgtcattgacattctactactgaagtttattccttttgtttaaagtcttaatattcttttccagtccccctaatgaatcacggttaccatgagaaggatgacctcatgttattgaagaaaagtcctggtctgagattcaggaaacaagattcagatggcttgtgtccagtgtttagttctggacccatttctggggctaagtggctatgtgattttggttgttcaatttatttaacttctcagaaccttggttttctcatttcagggaatctgggaccaataacccccatccattgttatatgactgctaaattcagtcttcaattcttggctgtcttcttccttgattaccagtggcatttaaccaaagtgatcattgtctccttgaaatactttctacttgaagtctcatgaggtcttcctccttcctccttgcccactacttctcagtctccttgactggttcctcctcaaccctaaaagctaaagtttgatgtgtactaggcctcttctctgactccatcctctctaagtgctctccatctatgacatttaacatcaccatcttggaagaatcccacacttatgcctccaacatggacttgtcctcctctaaaatccatactcaggtatccagctgccttcttgacatcttcataggcatctcaaaagtaacatgttcaaaacagaactcctgatctttaccccaaatctgattcttcccaagtcttgttcacctcattaaatggaatccctatctttccatgctcgagccaaaatctttgcagtcaaacttgatgtctaccatcagcctagtccacacctgcatctctctagttgatctatatcaatagcctctgatctagtcatcctagttgctctcttgcactcccaaagttttttttctgcacacagctgcaagagtacctatgcaggagaatcatatccctcattggatgaaaacttcccaatggtttatctcatttagagatctacaaaactgatttagtttcctcttcttttctggtcttatctatttctactctcccttttgctcaccaacactgcaggcacgttggtttcccagttatgactacaatatgccaagcacatccctgtcttgggaactttgcacatacttgcccctcggtgtggaacactctttccccagacagtgcatggcaagcacttcacttccttcaggtctctactcattcaaatattatcatatcaaagacgctgtcccctgaccactctacatccagtagccacaattctatgggattcctcttggtattattcttttaactgagacagggtcttgctttgtcacccaggctggagtgcaatagcatgaacatagttcaaggcagcctcaaactcctgtctaaagcaatcctcctgcctcagtctcccaagtagctgggactacaggtgtgtgccaccacatttggctaatgttaagattttttttcttttctttccttttttttctgggtagagattttgtcttgctctgttgctcaggctggtctcaacctcctgggctcaagtgatcctctcacttggcctctgaaactattggaattacaggtgtgggagacactgtgcccagccttcttggtacttcctaaccccttacctggctttagttttctccacagtacttgacagctgacaaatattttgttgtttcttttcctacctatactccagaaagtgaactccaaagagggcagagattgtgtccattttgatcactgcattgtctccagtgcctagaacagagattggtatgcaagattaccaatgtatctttactgaataaattatattcatgatatttataccatagggctaaagtgaagatcacattgtgaggccagtttgtatactggaaaaaaccttggctttacaattagtgaaacctggtttccaatcatggttgcacactcactggtaatgtgaacttctcagaaggtccattttccacacttgtgtgatgggtataatataatatcttgaaggtttattttaggcataaggtgtaacaaaaatgctcataaaggactcagctatgaggaggctagaaaatgagcagttttgagaatatatgtgtgaatctattttgtaagctctaaagccacatttatacatatagagctaatattactggggacagttgtgtgaattgtactgtgcaaagcatttcagggtgaatggtttcagtgcttgtagcatactgaaaattagaaaatgaataatggctgggatctatacctatatttacacattctaatggaattgaatgtctgacttcctattatttctgcataattttcccaataacctgtagttctgctgtgcctgagaaggcaatacattatcttattgtatcttatcttattatctcaatctgtcaaaaaaacatgtgcacaaattcagccacttaacatactcacatgaaacccaagtaattagctggtgacaagctgccagtcagcacttcctcagcatggtcctgctagatgagtactgactggtttattttagttcagcacacattgctaggttttgaggattcaaagggaaatatagtatgtccttattttcagggtactcatagtctcttgctatagtctagcctagctttacaaggggtatacaattcaggctctttgaggacaggaaggaggtcagctagtatataggtctgtaagagcttttaactgccacagtttgaagacagcaggaaggcagacagatgctatgctgattccccttttcatcttgagtttttccacaaaaacttcaaggtataggccatattctttagactatgagttagatttgaagccttaggacacaaagagttgtgagttgagggtccctgaaatccaggttcagttctgtattcttgtttgttgaagtttaagaatcacagactacaggactcttaggtaaatgcggacagcttcagaacccaagtcatcttgtcttggttgtgatgtaccctttccctggtttgcagtcccttccccaatgaccacacgggctcagaacaggacttaaagaactcagatacattgctgaactatctgtgtccacctgccccccaaacccttctcacctgctgcctccccagcagccccatctccccaaataaggttgtgcttcttccagatgtggaggttaaggagaaaatgctgcaaggtcaccagaagatgatccccacatatgagggctcaaccagggtagagttgttctagatctggacagcagaacagcttgcttcaccgtgagacagtgcacttcaagttaaaagaaattcttcaatgaagaagttggctgtggccagtaaatgccttcatttccctatcaagtaaaatagccttgtaagcactctcagaacagggaccaggatttattcatccttgcctggcacagtattgatcaactgtacatggttttattctctaggaatattcattgcctcacatttattcatcaggaattctgatacaactacataatgtgaaatacgtagacattgttttggcctcacatttacttggcaataaatatttcttgagcactgtgctagatcttgggagtacaaaccagaatacgacctatttcctgaacccaggatactgttcttggtgtatttttatttccagatttataccaaaattaacacattttttaccttttgaaaatccgtggctggtataaatataaaccatagagaaatactttaagatgattacttctgttatcttctcatctgtatttacttttttaaaactctgatgaacacagcacataagcacattcgttcattgaattctttagtaaccttcaactccacagttggagtgagacagagtccagctgagctccccagggctccatcccttgtagagaatgacttcctttagggagggcatagtgcagcccttgggagagggttgtctagctagacctctgctgctgctgtatccttgaaccttaatggcttggctttggactgcttgccgattcttgtacactgaagggaaggaaggaagactgacagcccatttgactgctttttgagttttccactgtgtcttcaatttattcaaatgcctttcctgaagaaagcaaatttcatggaccactccatttgcttctggactattgagacactggcagatatgatttaagaatctgaacatggaaacatttaaaaatacatgacactaatttgcagtgcagtttacatcttcgtctcggattttacattgtctctggaacctatagcagtcatttgaattatccatcattcacaaagccagctttgtctgatttttgtggcatccatttgttcttgtctttcttttcttcctttccacaatattcccacgatcattaacacaactgcttgttgtgccctgtttgaattttgcatttgtatccctgttactaaacatctcaatgtcaaatcccaaagtgagatttttcttccttcgctgaaacctttgatgaaaagttactgttttgtgtgcagtttgtagaattgcttaattggagattgtcagagtttcactggagggtattgcatctcattttgaaatagttgctgttgatttttctgagctcaagtgctctaaaaacaggcgagctgcgtttaagttatcattattatccatgataaataatgtataattaattatgggaccatttatctttcagtatttcccttcttatatcttaatggttttccatacgcatattacataatgtctgagtttactcttttatgattgtaaaagccatccagcttatagggtattgcagttacattatacagaaaaaaatgtgtaaatgtatatttcaataattaaaaaatacttttaatgctgcatttattttatgtatttccataagactgctatgccaacgcctctgacctagtgggaaatatttccatctttggtagatctttacctaaaatctttatggtaggttttaggaattccaactgaatttcaaaataaaagattctatggtagttaataagaaattagagacaaggaatcctggagtatgccatgagagcttacaaaaagtgagagatatgaaatgaagaaactttaaggtgaagagctgttttaaaatgtgctttcctattcattcagccattattcagccaacatttgctaagtgctcatcaggtacagtcaaagagactagggacacacacacatcaagacaaagctcctacctttaaaaatactgttttagaagaaaacgctgtcttgtgatggtactttttctttaggcttttatagctctttttttgtactcttggcactgcctttgcataacatttttaaataaggaagtaacttgaagaaaaccagttattttaggattatggaaaactaggggcttggtaacagcaaatctttcctttgaggatgctactgacccctcatgtttacatcatttgtcaataagcaggatcaatttttgccttaattatgagcttggaatagcaaagacaattgtacattggataaaggaaatatataatttgttttaaaatgagacctttgccattggaaggaaataattcctggagatcactgggaattgggaaatctgctaccactgctatattttccttacttgtctgttaccatataataatttacttttagtcagcataattaagtatatggattaccactctaatatgccaatggttgaaatgtaaagtacagtgacaactcattgagatagagagggttggcaggaaataccccaaatgaataaaaatatatctacaacttctatatttggataatgtactgtaaaataatattttactcatacattttttcaactttgattaattcattgttaaatttaaattttaaaaagtaaaatatactttgtgtttttcttccagttcctcagcttctgatgtggtttggctttgtgtccccaaccaaatggcatcttgaattataatccccacgtgtgtccaggaagggacctggtgggaggtgattggatcacctgggtgatttctcccatactgttctcttgatagtgagggagttctcacgagatctggttgtttgataggtgtctggtgtttcccccttctctccttctgtctctctcctcccaccatgtaagacatgtcttgcttcctctttgccttccaccatgattgtaagtttcttgaggcctctccagccatgtggaactgggagtcagttaaacctcctttggttataaattacccaatctcacatagcatctttacagcagtgtgaaaacggctaagacagctactgtatggaaagaagctagattcttttcttttctttttttgagacagaatcttgctctgtcactcaagctggagtgcactggtgctatctcagctcactgcagcctctgcctcccaggtgatcctcccacctcagccacctgagtagctgggactacaagtgcactaccacacctggcatatatatatatatatatatatatatatatatatatatatatatatatatatatatatatttttttttttttttttttttttttttttttttatagagacagattcttcctatatttccccaggctggtttctaactcctgggctcaagaaatctgcctgccttggccagcctatttgattttttattatctctcagagataaactatgttcctgctaactgctacaaaagtaaaatcgcctataagttaactattgtagtcaccttaatagccccctagccttacctctaaggctagaccttgaagacaataacttaaaggctaattatacaatgaggtgtttatgtaagtgatttattgtaaaactttaaaaatgttaggtgctattgttgttagaaaaaaggtaagtagtttggttatttaccatctttatgtcagaatatcttaaggaaatatagctaattatagaacttttgttcacagagatggatacggtagccttatttataacacacacacacaaaaggaaagacctaaatgcttaacaataaggaaatggttaaataaatgaggagagagtcaggcaataaaatcttacatagccattaaaattttatttatggaaaaccttattaccatggagaactgcttatgctgtcatatattgtacctgataaatgtcttagtcttaattttgaaatatttcagttgctacagatggattaaattttcttattttaatatttaaggcctagagattggcctgaggcatggaatatcccagcagaaattccatttagacaagagaaccattcaaattatttagcttgttagagaatatgtaagtattattatagctatagcatcaactttgtgatttttagtttatgtaagaagctgctttgatttggtgaaattaatttaaaaagtcctcatcataacatacctagattaattatctagtctgtgctttaaagggcagtttgttcacaaaggaggtacttttgaatagctacatcacctacagtaactcttactccaatctacccttttggttttctgtatctgtttctataatctattaactaaatattaaatcactggtttctctaaggaatagtgtagacttttggtaatgaatgttcagggcatgtaaaatgttggtaactttaggttttagtgaaactttggagttaaaactgcggctagttgggtgcagtggctcatgcctgtaatctcagcacttttggaagctgaggtgggaggatcacttgaacccaggagttcaagagcagtctgggcaacatagtgagaccctgtctctacaaaacaattttttaaaaaatgaggtgggaggatcgcttgagcctgggaggttggggctgcaatgagctgtgcttgtgccactgcactccctcctgggtgacacagcgagaccctgcctcagaaacaagtgaacaaaaaagctgctaatagatcacaaaagagaagtggttactttgtttagttcctttaaagcccaattttttcactttggtggtaatgaaagtttagtgcatcttgaacataataccagatctttccatcaattgattatatttcaaattcacataggattagttcatatcaaacaacataaatattacaatttcttaatgttcattatggccttggaaacattaaaaggttgactagtctgcattattgcctttgatagccaaatatattttatagtgaataatacatttctttttatattttaggacctgggctatgctcctgattttatacagactgccatggctccagatataaaagaccaaataaaaaggtaatttgaaaactatttttcatatggattatcttaattttttgtattcagtagaatgtcagattttaagatagaatctcacacacacacacacacacacacacacacacacttagtaaaactgtttgacttacatagtcacaaaaagtaaataacttgatgaacctttaaaaggcctttaatagacacatgcacacatatgtttattgcagcactgtttacaatggcaaagtcatggaaccaacccaaatgcccatcaataatagactggataaagaaaacgtggtatgtatataccatggaatactatgcagccataaaaaagaatgagttcatgtcctttgtggggacatggatgaagctcgaaggcatcatcctcagcaaactaacacaggaacagaaaaccaaacactgcatgttctcgctcataggtgggagttgaacaatgagaacacatggacacggaggggaacaacacacaccagggcctgttgtggggtaggggaaaaggagagggaacttagaggtcgtgtcaataggtgcagcaaaccaccatggcacaggtatacctatgtgacaaacctgcatgttctgcacatggatcctggagcttaaagtaaaatttttttttaaaaaagggctttattggccaggtgcggtggctcacgcctgtaatcccagcactttgggaggctgaggcgggcggatcatgaggtcaggagatcgagaccatcctggctaccacgatgaaaccccgtctctactaaaaatacaaaaaaaaaaaaaaaaaaattagctgggcatggtggcgggggcctctagtcccagctacttgggaggctgaggcaggagaatggcgggaacccgggaggcggagcttgcagtgagccaagatcgcgccactgcactccagcctgggtgacacagcgagactccgtctcaaaaaaaagggctttgttagttgccttgtggttctgaggaaagaaggcggttgccattatgtgaaagaatttttagaaatacaaagccacttttaatgccccagcattttgggggatgatttccagttggagaaagttagaactgaactgtttgctctctggcactctggatatcctgtgactcaggacgaatcattttatgatgactcccgggagttagtgtgaaacttgaggctatgaaaccaatcaaagcagcttcccaaactagaaccaaatccaggactctggcctcattatcacagtggtttgatttattgagctaatgaagaaagtcttttgtaattgagtactgaatatcatatggtgttactgaatatctccttttgaagtactgaaaatgtacttctgcttaagaaggatcaattccttagaacgtgctgttgttttagatctacatgaggagctttgaataattaacagtctggatgttgttgctatgtacgacttagttttattaatgacacatttcagaatgcaccatagagttggaagggctgtctttaaaataccgttatcatccaggagggggaggtatatcttcttttaagaagtcaattgcccagaaaaaagaataaaactagttatactatcttgcaaaaaaagaaagcaaagcttcatttgaaaaagtaaattttgtcaaatttgcaaaacttcttataaaatcaccagaattgttgctaaattttctatttgtatactatctttcacttttttttttctatttgtatactatcttcactgagatgtgaggaaaccctcacatgtcagttaatccacatttatactgctcttgctatgtatgtatgtgccaaatatagagctggacatcacagggcacaagcagtgttcaagtcaccagtgcctcatagatgagagggtggaaataggaacaggttagggggaggaaattatattcaataaaggtacctgttgaaactattattgggaagtatttctgtaaacagggtgagaatggtgtcaacctaaattgagcaacagggattaattctcaagcttattagggaatagcaaggaactgcaatcaacataatacataatacatgcctgctatggaggaccataagggtatccgagggagttgggaaaaaaaggaagcttttaaaggcaaaaagatatccatgtacctgttttgaaataaagaccactggctacaggtctttttacatgcagtggcatttgctcattggtggtactggctgttggtaggagagagttttcatagaagtggcttaactggaaatttccagttgaggaagtcatttctggcagttcctggtgcaggcacacatgtgtgagggcccttccttcatggcctcccactgcattttgttagggtttgacataagtgactccgttttgggtactgacaattttcacaggagttctattcaatagaagtaacagtaagaaggttgagaatggatataaaggagagtaggattgagctttagggaacccctggagagaggagaaatggtagcagctaaggagataacaaatgggagaggataccaggtgcggtggctcgtgcctgtaatcccaacactttgcgggttggaggcaggctgattgcttgagcctaggagttcaagactagcctgggcaacatagcaagacaccttctctaccaaaaatgcaaaacttagctggaaccatggtgcatgcctatagtcccagctgctagagaggctgaggcgggaggatcgcttgagtccaggagtttgaggcttcattgagctaggattgcatcactgcactccagcctgggtaacagagcaagactttgtctcttaaaaacacacacacacatgaggggagggaggtgaaccctggaagaagtgggaagaatctggatgatcacaggaaccctggaaggagggagttttaagaaagtagtggtgctgggggaggaggctaggaggatagagtgagttcacatggacctgaataggtttaggagaatgcacacagagaaaaagattttgtatttgattagaaagagtactagtgggtataaattctaattatagacacttagtaaccattctttggccagttgatagaagtggtttagtagaacatttaagtccatatagagcttgatgcagcagatgacagcagacaaggagcaggaaaagcagggtttccatcttgcctctgtcactaacaagctgcatgaccctggttgaatcactcgtctctcctctccttaattgcttcatctataaatgaagtttcttaaattgatgtccaaggatgagcttcagagattctgagatgtctgaaattataagctaaaaaaaaagggggttttccctctagggagaaggtctatagttttgatcagatcccccaaagtgataatgcatcctaaaaagttaaggactactggattaggtgatcattaaagtcctgcttagtatacaatatcaggaatttttaatctctgactttcgtttctctattgtattccatatggcctgtctcccaaatcactctcagagaccactctaaggattagattttctgaaatgtaattgactgtatcagtcatccccaggggattatttagaaaatccaggcaatttttaaaattaaagttaatcatttctttagtagtccacagacattttcattaggacacaacctttatatcactatttatatcatttactagccatgcatctaatgatcataaacaccagaagtggctgtagccacttaaacacatgtggatgtcattgcctttagtgttttccctccaaaaggaaaaaaaattgggaagaaaaagcagtttattgaatgtaaactggtgactgagctcccatcagagtgattgctttggtggttctcttctggcaggcatgtaagctcttagcagtagaggggtactgagcccccaagtatgctgctgcccttcataagatggccaggaaggccggtgtggatttgaatacaacagttatcactgtagataatgtcatgggggatgttattgacatttatattatatgcttctaagcaagaagccatcctgccatgtaatatacaattatgatcatttaatttggtgtaattaatagataaatcttaggattgagctctagaaatccctttcaggtctcttgttactttataaaatctggtgtgtcagctgcctttactggttaatgatttatgtctataaaccacctatgtggatggtattcaagatgtattgtttcactgaaagcaatgtttaaaataactctggacatttctaattcacacagaaggttaagctgaaattgtgcttcttataaatcataaagttatttagcacaatctgttatccacctttctcatcttaccatcatttggttctaactgatggattttgctgcaagtgatacattctacgtgtcacaacagaaagggaaatgaagttaataaatacttttattaacacttcagtttgaaaagctaaatgttgaaggcaagtgtcatacttttccttggagctgtttctttagcaccgtctttagctcccagtgaaatgcaagaggtggaaaatcccacctgtgaaatccaaacacagttcttgctggtcatggatatttgcaatattggtatgagctgtcaggtgcacaaaacactaatttgtttgcacgtagacacaagagttctgctagttatttatctttctaaagccattgtcctccctgacaggggcctgctaaatgtgctgtctatgcagaaggtttagatttatgatttgtgaaaattgttctggagataacattgtagagttgttctgttgctgtatagatagtgtattttgagtttatctttctctttcttcgaaaaagaggttcttgtttttacactaccgacgtagtaactggatgagtgatttcactgccataactgcttgttggtttattttaaatatggtgtttgctagcatgtggcagacttctgctttaatgatcacaatgtgatgacaaaaatgctaaatcttatccaatggaattacaacatggacccgtttttgccttatggaaaggaaaatacccctcagagattttaatttgctcataaaaagcaaatgtggaaacagaaacaccttgaacagagaggagaagtaggaacctgcctgggaatgtagaatttaatagccgaaattctatttcctgttgtgatagtaactgaagacaacataaaatatacttgtcaaaataataacactctttaaaattccacattggtgatttaaagatggagaagtttcagctttaatttttggtagggaacttgctttttgactttgattgctgtggacaggcaatccacagcaatcagtcaatgtggagtagcagaaaatgtcctcggcagctataatggcttgataaggtgatatgcagtttttatgaatggctgtacccaagcagcatcagctgatgctatggtggcttagaaattttcacaggcttttacctgttttccataactctagccatgcaccctcctttttgaggtgatacagagatcaccctttataaaaaggccctctctagtgctttggcacttagcctgggaaaacatgcctgcttcaggaatccctggacacatgcctcatgattataagagagaagattacaaacctcatgtcttttcaggaaatatattgatagtttattcttaactttggcttgttagggagcatcattctttactagacatagactactggtaccttccaaatatggtaaatcactttgcaagaacaagaagaggttatatctatgtgtttataacaaccctatgaaacagataactgtcattgtcctactttaaagatggagcaatttccatccttttgtagagagctaaaaaaaaaagaaaagaaagatgaagaaacttggggatagaaaagtcaggtgggttgcctagggtccagagcctacactttaaaccaccaggcttcacttttcattgtgtttctaaggccctaacaacatgcttattgttactagagaattgatgaatgttatgaaagtgaggtaggagactggcaggacttgttttctggtcacaatcctgctgaccaaaacaggatctgatccagacaggataaagtgaaaaactagcagaagccagaagatggcaacaaaagccatccctagctgccctcattgcttattggcataagatactcccaccagtgtcatgacagtgactggaaagtgaccactcatttctatggcaatgactcagaagttaccgcccctttctagaaagttctaatttacccattcctcaatttatattgacccactccttaatttgcatgtaattgacattggatttacatgaatataaatacagctgacaagagcccgtacattgctgactctgggcacactgtctatgtgttagccctgctctgcaactgttcaataaaagattgctgtctaacaccaccggcttgcccttgaattctttcctgggcgaagccccagtgttggggcttccctctcctgcatgaaaaggaaacgttcagggagcttagaaaatttataactgggggtcctaacatgttctgaaggggatgaggatggtctttcagcagaagtgatgttgaaattgagatctttagggtgaatataatttgctctggaaaaaaataaaaggtttcaagtagaaaagactacactgcacattttcagccctggagggatatgctggagggatgcaggaactgagaagtccagaatggtgacatgcagagaaaggagggtgatgtgcctggagagacaggtgggagcaagaggggagaggactttgaaggtcatggttctgattttgtactttactttgaacacaaataaaaaacaactaaagaaaagtaaaagcagataagttatatgatcagatgtgagctctaaatatatcgttctggctacaaggtggtttagagacaagagatggaaataaggagcttactgatgaaaggcaattgagagctagtggcttgggcatgagaaagaactgtgagtagtgtattgattgaagaaatttttaggaggtagaactggcaagatttcataatagagggaatataaaaggttagagaaaagtaggtctcagtcttgtacaccatgccagtctcattacatttaataaagtagtattaaagagacataaacccatacacactttaaaatctctaacagttaggaaatgactaagcaaactctttgctctattgagtaatatgtcatcattaattattgtgtttataacagttgtaagacatacaaaaggcatattatttaatttcaggtaaataatgagtgcatgatgataaaagtataccagtagtctgatttaatatatgctgaaaacataaagatgtcaaaatcctacgcatagggaagaatcaggaaagaatttacaaaagatggtatgagtaatttataccggctgctatgagtaatttcttcttctctccttatttatttatttatttatttatttttatttttgagacagagtctcattctgtcacccaggctggagtgcagtggcatgatcttggctcactgcaacttccacctcctgggttcaagagattctcctgcccctgcctcccaagtagctgggattacaggcatgtgccaccacacccagctaattttgtgtacttttagcagagaaaccgtttcaccatgttggccaggctggtctcaaacttctgactcagatgatccacctgcctcggccacccaaggtgctgggattacaagtgtgacccactgcgcctggccttctctcctttttaaaattttcacattttctttatgacaaagtactacttttataacaagaaactatttttacaataaaatagtatggaaaagagcagctactttaaagaaaattcatttgtcatttgccctttgttatttgtatacatctgaatttttatttgcagcatgtttaaaatgagacaaacctgcatacatttttttaagtaaagagtttcattattcatttcttgcttatgttaaaatgtctaacaataaggaaaaagttaagcaaactgtttggtctattaagtaatatgttatcattaattattatgtttataacaattataagacataggaaaatgacttctgctgtggtgagaattaactgactttagaacgtttggaatggtttctgtgttgaacaccattaagcaccacatataatcctgaagtgaatccatggagggctgccgcaaatgttgtttgtgaaccataccatttatacgagcatgtgtggaagccctaagagatagaggagtctggtaacccaggtctaccagggtttagacccatgcatgtaaccagtgcacactcaatgttgtatctctatggcccttctgtaccaaaagctgcatgcagacaggagctgtctgttgttcactgctgtatcctcacggcctgagcacatgctaagctctcaagaaactttgttgaacaagtgaatatatttgtttatcagtgtatacaatgattttcttaggttggttctggaaatcaaattaatgtgttaaaggttatggacatttaacatttctgaggtccttataatgtattaccaaattactttgcagaaggcttgtaccaatttatacttactcactagaagtattattttgtttgtttaaccattcctttaccagcactagatatctttattttcttaagattttaagtgtttttgataaaaacaggtaaggcttgttttctcaatttctgagttttaatctaattttcatggtttgttttattttataaaacaaaaagttcatttaaaaatttggttaataaagaaaaaataaatgcaataatgatccaactacacatagctacagtcaatattttggtatgtatcttttcagccatctatatttagacttatttacatatatttcatatataatccattattatatatgtataataaaaagtcagactccgtttttgatgtttgactgctggcagctttcaagccccaccacgcccccttcccctgctcccctacatttgggcaagcaagtaaaaaagacctgttgcttcttcctctggctccaatgagaaggacacaacacacaaaccttggccaacatgtgggagccttcaccccagctttatctcttcattgcaataaagtctaagctgatcttctcttctactctctcaaatcatttgtgaatctgtttgggagcctttctcgctctccccagaaagcctcattatgcgagtagtaaatgtctgcatatcctcttggtgtgtatgtagcattatcatcagtctctatatgtgactccaattcaggtgtttaggggtgaagggagtctatcatgtcttcttgtggagaccacaacaatacagattataaaaatggagtttaacatatatatttcaaacaagaatgagattatactatacatattttgtaataatctgatttttatttaataatgtattttcaaaaatatcattaaataattttcacaataccatatttaatgacagtatattataccggtatatggtacaaatgatctaactgacttattattggatacatatgttggttccattttttttttggctattttaaataagctacagtgaataaacatccagctatacttttgtgtctattcttgatgatttctgtaagatagctttgcatttaagtattaatgcatcataagcacattcactaaacatttacagagtacgtgaaatgcacaacttttgggactcctaaacataaaagacatcaaattttcttgcagagaagtccctatataataagggatccagaaaaatatttacaaattaaaaaactgaatttttggttaatttatcaggtgtgaagtttttcagggtggcactagtacatttctatttatttgtgacatgttaatgagcagtttcttctctgatctatttttagtgagttataactggaaaagtaggtttcatttgacatttaaaaaattagattacattaaaatataaccacaaggcagggtttttataatgctcaagtattacatatgtttttataaccacagagcctgacaagtgatttgcttctttgaaaactgaactcacattactgaacatagtgtgtatgtatgtgtgcaaatttatagacatatgaggatgaaataactaatttacagagttaggtttactttctgacctagtgtctaactgaaatttcaggttcatatgtttgttttgttaaaagatgggggagagggagggaccaagatggctgaccagaagcagctgcagctggagactcccaccaaggagaaagaaaaaggtgagtgaatcctgcactggcaactgaggtatccaggttctctcactgggactgactaggtggttggcatgacccacagagagtgagaaaacggagggtagagcaattgtccacctggtagccacatggggcaaggaagctcccacccccagccaagggaggcggtgagtgattctgctaccccaccttggaaaccatacttattccaatgatctgtgtgaaccacaggtcaggagatccccttatgagcccatgccaccagggctttggatcccaagcacagagctgtgcagattctctatggctgctcagctagagactgtttaaggctacccagttctcagggggaggggaaaccatcatcattgatgcctaagaaaattggggagactgggcagtttggacccaggaggaattctccataacatagcacagcggttgtggcagactgtggccagatttcctctttaggctagaccctaacccatccctgctcaacgggtagggcctgcttgtgggaatttcagcaactctagccaggggtttcctgacagaactctgatctttctgggatggagtgcctatggggaggggtggctgtgatctctgcagatcagcagacttagtctttcttcctgctggctctgaggaatccaggcaatatggacaagtgggattccccccagtatagtgcaccccctctgccaaggggcagccagagtgcttcattaagttggtccctcatcccatgcctcctgactgggtgagaccctccgactgggtgagaccctccaacagggtcaccggacactttatacaggagcgttcctgctggcatcaggttggtgcccttctgggacagagctcccagaggaaggagcagcaaccatctttgctattctccagccttcctgggtgacacctccatgtgtgagaaggaccaaggtgaatagggtctggagtggacccccagcaaactgcagtagccctatgtaagagggacttgactgttaaaaacaaacagaaagcaacaaaaacaacagggtcaaaaatagtacccacaaaaaccccatccaaaggtcagcagcctcaaagatcaaagctagataaactcatgaagatgagaaagaatcaatgaaaagactctgaaaactcaaaaagccagagtgcctcttcttctccgaatgatcatgacacctctccagcaagggcacagaactgggaggaggctgagatggatgaattggcagaagtaggcttcaggaggtgggtaataatgaagtttgctgagctaaaggagcatgttctaacccaatgcaaagaagcgaagaataatgataaaacattacaggaactgttaaccagaataaccagtttggagaggaacataaatggagctgaaaaatacaactcaaggacttcacaatgcaaccacaagtatcactagctgaatagaccaagcagaggaaagaatttcaaagcttgaaggctatcttgctgaaataagacagtcagacaagactagagtaaaaagaatgacaaggaacaaacaaaacctctgagaactatggaattatgtaaaaagaccaaactatgattggggtatgtgaaggagatggggagaatgaaaccaagttggcagggagaatgaaatcaagttggaaaacatacttcaggatatcatcttggagaacttccccaacctaacaagacaggccaatattcaaattcaggaaatccagagaaccccagtaagatactccatgagaacagtaaccccaagacacataatcatcagattctctaatgttgaaatgaaggaaaaaatgttaagggcagccagagagaaaggccaggtcacctacaaaggggaacccatccgactaacagcagaactctcagcagaaaccctacaagccagaagaggttgggggccaatattcaacattcttaaaggaaagaatttccaatccagaatttcatatctggccaaactaagctttatacgcaaagcagaaataaaatccttttcagacaaacaaatgctgagggaatttatcaccaccaggcctgcctggcaagagctcctgaaggaagcactaaatttggaaaggaaaaaccattaccagccactacaaaaacacactgaagtacaaagaccaatgacactatgaaacaactacgttaacaagtctgcaaagtaaccagctagcatcatgatgacaggatcaaattcacacataacaatattaaccttaaatgtaaatgggctaaatgccccaattaaaagacacagaatagcaatctagataaggagtcaagactcatcattgtgctgtattcaaaggaccaatctttgtgcaaagacacacataggctcaaaataagggatggaggaaaatttaccaagcaaatagaaaagagaaaaaagcaggagttgcaatcctagtttctgacaaaacagactttaaaccaacagagataaaaaagacaagggcattatatgatagtaaaggattcaattcaacaagaagtactaactattctatgtatatatgcacccaatacaggagcacccagattcataaagcaagttcttagagatctacaaagagactcagactctcacacaataatagtcggagactttaacactccattgtcaatattagacaaatcaatgagacagaaaattaactggatcaagtggacctgatagacatctacagaactctccaccccaaaacaacagaatatacattcttctcattgtcacatggcacttaccgtaaactcagtcacataattggaagcaaaacactccttagcaaatgcaaaagacctgaaatcataacagtctctcagaccacagtacaaattagaactcaagattaagaaacccactcagaaccacacaactacatggaaattgaacaatctgctcctgaatgactcctgggtaaataatgaaattaaggcagaaatcaaaagttctttgaaaccaatgagaacaaagagacaacataccggaatctctgggaggcagctaacgcagtgttaagagggaaatttatagcactaagtgcccacaacaaaaaactagaaagatcttaaattgatattctaacatcataactaaaaaaactagagaaccaagagcaaacaaaccccaaagacagcaggagacaagaaataaccaagatcagagctgaactgaaggagatagagacatgaaaaacccttcaaaaaaaaatcagtgattccaggagctggttttttgaaaaaaataaaataaagtaaaccactagctggactaataaagaagaaaagggaaaagaatcaactagacacaataaaaattgataaataggatatcactactgacccctgaaaactagacaaccgtcagagaatactataaacacctctgtgcagataaactagaaaatccagaagaaatggataaattcctggatacatgcaccctcccaagattgaaccaggaagaagttgaatccctgaatagacctataacaagttctgaaattgaggcagtaatagtctaccaaccaaaaaaaagctcagcaccagatggatttacagctgaattctaccagaggtacaaagaggagctggtaccatttcttctgaaactattccaagaaattgaaaaggagggactcctccctaactcattttatgaaaccagcatcatcctgataccaaaacctggcagagatcaacaaaaaaagaaaactttgggacaatattcctgatgaacatcgatgcaaaaatcctcaataaaatagtggcaaactgaatccagcagcatatcaaaaagcttatccaccacgatcaagtcagtttcatccctgggatgcaaggctggttcaacatatgcaaatcaataaacatgattcatcacctaaatagaactaaagacaaaaaccatatctcaatagacgcagaaaaggcctttgaaaaatttcaacatccattcatgttaaaaactctcaataaactaggtattgatggaacatacctcaagataataagagccatctgtgacaaacccacagccaatatcatactgaatgaacaaaagctggaagcattccccttgaaaactggcacaaggcaaggatgccctttcttgccacttctattcaacataggtgtaagttctggccagggcaatcaggtaagagaaagaaataaagcatattcaaataggaagaggggaagttaaactgtctctgtttgcagatgacatgatcctatatttagaaaaccccatcatctcagcccaaaagctttttaagctgataagaaacttcagcaaagtctcaggatacaaaatgaattttcaaaaattcctatacaggcattcctatacgccaactatagacaagcagagagccaaaatcatgaatgaactcccattcacaattgctacaaagagaataaaatacctatgaatacagctaacaagggacatgaaggatctgttttataggtatgttttcaacttaggaaatacagttatagtaatggttttaatgaccttgtctactaattctaacatctgtgtcagatatgagtctgttttaattgatggatttcttttccctcagtgtgagcctattttcctgcttttttgcatacctgctaattttggttaggaagacagacattgtgaattttaccttgttagttgcaagttatgttcatatcttgagctttgttctggattgtgattaaattactttgaaactggtccattttggtcatgcttttaagatatgttaggtaggaccagagcagcatttagtctaggactaaattccccacttttgaggcaaagccttctgagcattctacctattttcctatgaattgtgaggttttccagtctagctagtgagaataggcactactgtcagacttaagtaacttcttcatacccatgcactgctagttctctgcggaatacttcggagggaccctctgtagatctccagagttgtctatctgtatagcagatgcctgtctctctcctgcaatctatcctgtgaactccctggacttcctggtaatcggtttatgttcttcttggactcttagttcctcaactcggggaatctgccattctccatctgagttcctcctcctggtgcatgacctggaaactcaatcatacacacacttcatttgttttatatctcagggatcacttttctttgttgcttgatgtccagtatcttgaaaactgtttttttacatattttgtctgttttcttggttatttcaatcaggaatataaatttggtccatgtgactccatcttttctggagtgaaatttctacttcaagtgttcatgaaaaggtttttgttagttttgccatataattttctatttgaatttaggcagtaatctaaattgtactttagattaagaaaggaatgaattactttatgtcaaatacatatttatataaagaaatattctacatacaaaagatatattgtaaataaaataattaacttttgtgttttttcatagtttggttggaaaagtaattattttgatttattagcagctataaggtaagtctaataataatagtagcagtaattttacacttttaactatattacagttaaaatcatttttttgaaattaaaatacatatatctggagatcatgccaaatacattttaaactgaatatatttatagtttttaatgctgcagattattaaagctgaatacataagccttatgcaaagacttaagaaattttctgaaacaaagtaactatcacttactgagtgtgtgtgtactttgtggcaggtacttcataaaattattttttattctcataatgtatttattaggtagatatcattatcctcatttcagaaatgaggaaactggtatctaatagggttatataatttccctaagttacagagtaagttaaatggtagagcctggatttaaacaggtcagataactaaaacccaaagtattttattatgccatgctgaccaaaattctcaactctataatgaacttccagttattaagatttttaagaatgtgttttataatgaatttgttggttagttttagcttattaacataccaagtaggagagtaatattttacaaattttctctcctgtaatgtaatgataatttgatgtcacacttcaggtctggttataactcacatttgaaacactttgcagtttccatggtgctttcacatagttttatctattaattctcatagccacatgggtatgacattaacctcattttgctcaaactttaccacctggtctaggttcccatgattcttagatgagtgttttttctatggttccaagctagcctttttgtgtcattaacttattttattaaaacaaataagcaaaaccaaaatgacactgatataaaatcaaatcattttccccgcttttataatacctttaaaaataaagttttatttgtaatatattctttttatatttgaacatgtattaaaacatttttctcgctatagtaatgctagttttttatttgctttgcagtcttgcaggcaatctcactgaatgtggtactcagggtactggtggaatattcaccgattatcatttggtgccagactgacaggaagcaatgaatatatatatatatatatatatatataaaggttatagcatggcatatagtatctacattttataaattttattgttcattaaactgtatttaagtagtgcccatttaaaaatatctttgtattgtgaaacacaagcaaatgttatatcctagtcattattatcttattaggatccagaactaagttgtaggagaattcttttttttttttttctttgagatggagtctccctgtgttgcccaggctggatggagtgcagtggtgtggtcctggctcacggcaacttccaactctctggttcaagcgattctcctgcctcagcctcccgtgtagctgggattacgggcacataccgccacacccagctaatgtttgtatttttagtagagatggggttttgccatgttggccaggatgatcttgatcttctgacctcgtgatatgcccaccttggactctcaaagtgctgggattataggcatgagccaccgcccctggccataggagaattctttaaggcatcttaaagatcatacttcctcaaaataatatgcaatatttttgtacttctattataatattatgatgtctaacttattatcaatgtttgttgttattaaaccattattatatctgttatgggttgaattgtgtccccccaaaaagatacagtatgttgaagtcctaacccccagtgcctaagaatatgaccttatttggagatagggtctttaaagaggtaatcaagttgaaatgaagtcattagggagagccgtcatccaatatgaatggtgtccttattagaaggggatatttggacagacagaagatgagagtgatgcatttaaaaccacggaacaccagcgattggtggcaaacaccagaagctgggaaggggcaaggaaggattctcccctagaactgtcagagagagcatggccctgcctgctgataccttgattttgaatttctagcctccagaactgtgagcctataaattcctgttgttttaagtcacccagtttttggtacttttttatggctgccctaggaaagtaatatagtacctgaaatagaaatagaacctctccctttaaggactgaatacactgaatatactgagaccttaaatgccaggacatgctcatgatttactttttctctcaccctattccatccaagtcttcgttgttagaagtagcagaaggcccttggtcctagaagctccttgctctcagaagctcctgcaatatgcaccagcaaagtcggcttcatttaccaatatgaagcttacaatacacaggcctctgctttagtggaaaacaggagactttagatgacattccaaaccgctgtcagtctagacagtagatctttccagtcttgtctccacttttactctgtgagccttgtctgtagccagacaggcactgctcactcttctctctatcatttctttttcctcctccttggctgtcatgtggcaccagactggcaggaagcagtgaaaacacgagtgtcagagcactgatgggaaatgtggctgaggccctttgctgttagggctctgcattgtctccctcagggggagcatctgcggtctcagtgtggagagcaggtggctcccacactttatacctactgacctggcgtctcaccggagcttctgaatcacaaccccactagaaagatctgaatagatttgactttatttataattttattcttacctcaaaatcatccacccctgttgaagacatgtccatttctgacagtgacatggtcagtcggccactaattcagactcaggcaatcttggttctcttctatggtctgctttatctcatcaatcaccagatgagatcagtgtttcaatccataatatttctcattttgtttctttcatattcactcacacttgccagtttcctcatctagattctgcaggcgactataatagtcttttaattggtttccctgtctcttgtttctagtgccagggctttccaactctgaagtagtgatagtcttatctattcaaccagattgtaaactctttgaaaagatggatctttgcatatctaggaatttatcataatagcattgtctcacccaaaatagcaattaaaaaccataaattctacagacattacctggaatcctagttctaccacttataagctctgtgagatgggtcaagctacttaacttctatttgcctcaattcaccgatctgtagaataaggataatctgtgctagttaggttgtagaatgggaaggtggtgtgaatcaaataataaatgtaaagcacttaggacagtgccaaagatatgtagtaagttttcagtaaaatgttcacctctattttactgttttgcacttagatgttcatcagatatctgtaaatgaatcaaactgatactatattaacacaagaacagacatgtgctttgactgcatctgaacatatgttgcccatcttaattgtgttgacgtagtcctgagctttttgagttcctcaagcataaaattaggataacacctactcacagggttgtttaaagaggaaaataaatgagctgccattggtaaggactgagtccagtgcctgacatatagtaaacactaaataaatggcacccagtagaaatagaaataatggcaatactattggtagtaaagcagtggtagcagtgatggtggtggttttaatggtagcaataatagtagtaatgcagtgggcagcagtatttcatttagtttcttataactgtgggacatataagaaattgagagtagcttgggggaatgtgaggaaaagacatcaagatttatttgagattgggtgagcattgatagttgaagccatggaagtggatgaggtggcttgggaatgtagaggaccacaaggggagaatcaaggaatcaagggaagggaaggacaaggggaaagttgagtgtattgggaagtctagggttgggtttcagtaagttcttgtccatctgattcagaggtagtgggaggaagcacataagttctaagaggggcagctgtgataagagagttaaggaagacagctagtaggctgtgctatagtgcctgcccagcctgcatctccagtcatttctcaaccatgttctcacctttccacctttctccgactttgtctcctttccttcttaacatttaaagaattaatttctttatctatatacccatataaaatatttttcataaatgaataaatctggtcatattccatcttctttctttaatgtagttctcttattattttttgtttgcctcctcttttcccactgctcctctctcctgcttattggcatcgcttctgcctatgtaatcatgctatagaccaaacatgtattcttttatactttgtatttaccctcagataatcatatacggatgtgaatgcatatacacatattaacatattggtgtataataaaatgttctaggccgggcgcggtggttcacacctgtaatcccagcactttgcggggcagaggcgggcggatcacgaggtcaggagatggagaccatcctggctaacatggtgaaaccccgtctctactaaaaatacaacaaaaaaaataaaaataaaagtaaaatattctcctatctgataagccaagtccttcctcatccccttttcttaaaaaatattttttttgtggctgggcatggtggcttgcgcctgtaatcccagcactgtgggaggccgaggtgggtggatcacctgatgtcgggagttcaagaccagcctgaccaacatggagaaactgcatctctactaaaaatacaaaaaaaattagccagacgtagtggtgcatgcctgtaatcccagctacctgggaggctgaggcaggagaatcacttgaacttgggaggcggaggttgtggtgagctgagatcgcgccattgcactccagcctgggcaacaagagcgaaactccatctcaaaaaatatatatattttttgctattgtttggcatttgttctttcacatgagccttaagattatcttatccaaaggaggaaattctaactggatttgttttgagtatataattaacttggtagaactgacattttattataatgtctttccatctaagaaaatggtttgtttttccatttttatagatcttgttttattgttcttcaatacattttagagatatgtgccatggataatatcacagaattgtcaacttacttccacactttgcttagaaaggatggtatgaagttggaaacaattgcagttttgtatgataaagactggagtgtgtgcgtgcgtgtgtgtgtgtgtgtgtgtgtagatgtaacgtttaagaacaaaaccatattattcactgacctggaatttcagtaggagacacttgggaagagtcacaagttacatctgctgaggatcaccaacttcatacgatagctgttcagccactgtaccaaagaagacaatcccccccaagcaggggggcttgggtatgaggaactgtccatcggaaagctttccagtatgggaaatcatatattgtgcataggtgaaaaacagggaaaactatggttcagagcagccaggaggagaatccgaggaaaagtggctacattataccaaatgatacatttgatgaataacaattatccaaactgtgtattttacatattcagtttctatatttaat

SEQ ID NO: 349 - DNA, 29784 bp, Homo sapiens
tggaaagactttgggaataattagattgtactatcagttataaactgtcagttataaatatcttagcaaggtgtatgtgtgtgtgtgagagagagagagagagtcctcgggtcttacttatcacaatttcaccatcctctactacatgaagccccatctcatgtgtattagtttgctagggctgatgtaacaaagtaccacaaactggatggcttagacaacaaatgtttattgtctcacagttctggaggcaagaggcttgaaataaaggcgttggcaaagttggttccttctaagggctgtgagagagaatgtgttctatgcctctcccctaacttccagtagttctctggcagtctttgccgtttcttgtcttctgctgcatcactgtcatgtctgccttcatcttcacatttcgttctcactgtgcatatgcctatgccaaatttctccttcttaaagaacatcaatcatattgaattaaaggcccaccctactccagtatggcttcatcttaactaattccatccaaaaataccctatttccaaataaggtcacattcttagatactgggggttaggaattcataatgtgaatttggggggacacagttcaacccacaacactatatcacaaaataagtgacaatattgaacataatcatgacttttgttgtttacctttacaaataagaatttgtacttacaaatatttgcaggcatttacaaatgtttttattttacagaaatatttttggtgtttatactgccacagaagaaataacaatgtcttggttccagctttcttagctgaatgttttgttgtaatatttgtttaaatatctgtatttcccagtagacttatggggtgaatatggcatgatgtttactatcacacagtcagaatctaattgacttgcaactggtaagttttcaatatttattgaatgaatgaataagtaagctattatattgtacacttaaatatgggtttaggtggctttgagagcttaattttttttgagacggagtctggctctgccggccaggttgaagtgcagtggcaccatctcagctcactgcaatctctgcctcctggattcaaatgattctcctgcctcagcctccggagtagctgggaatacaggtgtgcaccaccacgcctggctaattacttgtatttttagtagacatggggttttaccatgttggccaggctagtctcgcactcccgaccttaggtgatccacctgtctcagcctctcaaagtgctgggattacaggtgtgaaccactgagcccagccgagactttaattttgatttggagttgcagctactgaacatgtaggaaggatggtctgtgagtgtgtgtgtgtgtgtgtgtgtgtgtgtgtgtgatgtgctcactccgaaaagttgctatttcagtaaccattaatttaatcacagtctttctgtgtgtgtaatgcagataattgcttataaaaggactgttcagttctgtatttctgatctttgtaaattttatgacaatgaaaaatattttccattacatttaagtaagttaattctaaattttatttagtttctataaaacttagcaacttagttacaaaatacaatttatctgtagaaatatttgcaacagtcagtttagttagcagaaataccttttgacatgaataattaagaagagtaaggcatttgattgaatattttactattattattaattcatatttatagatcccattatatttatattacataatgctatttagacacttcaggctttcttttagaaatatgctaccaaaagccagaatcatgttcacagagaaatattaaaaatattcttattagtcacaatacaaggatgtccaccatcaccactattatccacgtgtattttttatgaaagcactagtcattcaattggacaaaaaaattaaattgtgtaaaataggaaatagggatgaaaagttatctttatttgcaaacggtatgactttctacctgaaaaaccaattgaaaaaactattcgaaacaatatgaaaattcactgagtataaaaatgttattaaaaatcaatagttttcctttatgcagttaaaaatacagcagggaaagggatttttatttaaaatagcaataaattttaaaatgtgcaagacctaaaggaaaaaaaaattaagagacgtgaaaacctgaatcagggacctccctcctctctgtgcatgtggcctcactactgctgcttctggagggactgaaaaatccctgagaccagcatctcagggatgctggtctggcagtcagagaggtctctgagctgacaggatttcctgaaatgctgtgaaaattttgcatcctgaaatccatgctggaatcctggctcataatatcccaaaaggtaatgctgacatggccaggcctgattgttgcctgtaatctctatcccttcctgaagacagtggcttctccaggtgtaatggttgagaggctgttgagcaaattggtactggtagagtaactttactgagagatgccaccaaaaaccacaatccagtgacagtggtgtgtcagaggactatgaggcagtgtccacagacaggcagagctccaagagtaaggacaccttcttggagactaggtgccagttagtcttgaaggcattcacattcacttatatggcacaatatgatgaagcaatttcagattacctcaggaaatagcacagtaaaggaatatctcagatgcccttgcagtacagaatgatccctcatcagactcctgtgcagctatacacactgaagcctaagcttcccatcacagttctaaatggagcccctggatttaaaaacttttgtgatgctttgaatgcctggcagctggtgaaggaactcaaagaggcattaggcattctatctgctgcccttttcaaacatgtcagcccagcagatgctgctgttgaaattccactcagtgaaaatgaggccaaagtctgcatatatcataagcaaagttaaaagacaaatgaaaaattgggaaatataggcaatgtgtatgttagccacagggctaattttcttaataagaaaagagctctcatgaatcaacagaaaaaatgaacaactcaaaagacaaggcacatggacaggcagttcacagaaagaccactgacattgtggctgatatgtaaattgaaaagattctcagtgtgctcatgatgaaagaaattttaatcacaataacaataagataacatatttcacctaataggttggcaaaaaattttaaaatttgacaacaacaagtgatgacaaggatgagggacaacctaaatattgatgagagtataaatggtggcaatcactttcataggcagtttagcaataagctgacaatttttttcgagacagggtctttctctgtggcccaggctagacttcagtggatgacctcctggggtcaggcagatcctcctacctcagcctcccaaatagctggaactacaggtgtgcactatgatgcctggctaattttttaatttttttgtagagacaggtgtctcactatgttgcctaggctgctctcgaactcctaggctcaagcacccttcctgccttggcctcccaaagtgcagggattacaggtgtgagccaccactcctggccccaaaattgtttgcataccttttgttacaatggatttactttccaaaaatgtccttggtatgtatgtatgtgtgtttgtgtgtttgtgtgagagtgtgtatgtctgtatgaatgtatgtatgtattatatataatcttcatagaaggatgcaaagatatacatacacaggtgttcattttgctaaggtaggaacaccacatcaatacaagagaaaaaatagctttgtacataacaggaagaaactgtccatcatagtaggtaagggtatagagtcagaatgccatgattcaactccttctctgcaagttacctgcagcatcatcttgggtaactttcttctttttgtacttcaattctcccatctgtaaaatgggaataatagtactactctacctcatagagttattgtaagaattaagtgtaacgtactagtaacagtgaccggcacagaattacttgatccataaacattagttatatgatactaattatccccgttgttctaaaaggggagaaagctgcataaatgtaacctagaagtcagaggtcaacacaggcagcttctattttcatcctaaactaaacctaaagtgggcctcgattctccccacaaggaaacctagtacacaaaatactagttagcacatatattagtctgttctcacactactgataaatacataccaagagtagataatttataaagggaagaagtttaattgactcacagttctgcagagctgggaaggcctcaggaaacttacaatcaaggcagaaggggaagcaaatatgcccttcttcacatgacagcaggaaggagaagtgcggaatgaaacagggaaatccctttataaaaccattcaatcttgtgagaactcactcactatcacaagaacagtatgagggtaactgcacccatgattcaattacctcccaacaggtccctcccacaacatatgaggattatgggaactagaattcaaggtgagatttgggtggggacacagccaaaccatatcagcaaagtagattgaaacattgagcaaataacaaaggattgaagggagatcctggacccaatagcatactttgtccatcctcattcaacttgcgtctttttcttagtttgtcgttacctctttattatgtggagaggatagagatttttctgcccacgtctcccccttccctaacattgtatccgtgtttctagaaaccagcctttctggctttctttgatttatatctaggttccatattttttcaagtacatgtttgtgttttttaaaatatatatatggatatacatacatgtatatatatcttttgcccatttttatctatagggctcatgctttctcatcaaactgtaactcttcataaaaattttattaaacctttgtctaatcctgtgcacattttacagaaaatattgttaatctaattcaagtaatacttattagttattaaattgtgaaagatttttgaaatttttgaaatgcatgttactgacatgcaccaaaataaaagtcctcattttccctagagtttcactgctaatactatcagactggctgtcttatttttaagcataaattccatgttggaaagagaagctttatattcaaataatgtaatccatcactaaaggttttcatatattatgtatatgggcggggcatggtggctcacagctgtaattccagcactttgggaggccaaggctggtggatcacttgatgccaggagttccagaccagcctgggcaacatggtgaaaccctatctctacaaaaaaatacatatatacatacatatatacatatatatatatatatatatagagagagagagagagagagagatggagagagacagagagagacagacagggtcttgctttgtcaccaaggctggtgtatagtggtgcaatctcagctcattgcagcctcaacctcccaggcccaagcaatcctcccacctctcagcctcccaagtagctggagtggctgagactacaggtgtgtgccaccatgcccagataattttttcattttttgtatagatagggtttcaccacgttgcccaaggtggtctcgaactcctgggctcaagtgatccttggcctcccaaagtgctggaattacagctgtgagccactgcgcccagcccatatgcttaatatatgaaaacttttagtgattgattacattatttgaatataaagcttctctttctaacctgcaatttatgcttaaaaataagacagccagtctgattcctaaaaatttgatcttaattttctcaacaaatgccaaaaatcatctcagtcaaagttaatgaaaggtaaaatgagtactatagaaaggacatcaggtgtctcacagactgggctgtgaagaatcaaattattatgtttggacgttttggttacttctgttgatgcagttggtaggctttccctctaaaatgctgccatggatataacatcagtccaattgacccagttcccttccccttccccttccccttccccttcttcttctcctcctcctcctccttcttcttccagcaaatatcaaatttggagagacaatctggtagatttagcttgcgtaaagggtctgtctacccctagcttggtcacctgtggttagagggtcagggtgttgtagtactgacaggaccactggagcttcatacctccattttaggggtcattccaggagaagggagcagcactcccagaggtgttcattacacccttaatggttgtgggtctcaatgtgacaaaagcagaagagcatctctatcttttcttagctcttgtgatctccatcctgttgtaggagaaaatgtcctattatcccttattaccatgctctatgtcagctcccataagaaatggaaactgacatctaagccagtagagggagacattccacaagagatggcgtcatctcctatttcttccccaccatatgctttcccactaaagatgaccaacaaattgcaggtgtcaccactgcactgctctcaggcttgccccaagagctctggtccagcctggcctccaactcgtcagtgttaatcaaggtaacacaaggaaaatatatacagagactaacaacttattacagtacctcaaaacctatgcatatttagacaacgagaatcagtattccttttagtcattcgttcatttatatattcatgaatttgctcaaccgatatttattaaatactggctatgtgccaggtgcatgacataaactgtacagtcattcaaaccaagtttcaagtctaaaagcccttttcctttgaagttcgtttccccctgaagaaagttagatccttaagttaccagtcccaaagcctcacctcccccaatcttaggctcaacactaattattgtaagtagttttcattttctgtctttccttttagacttaaggcttcgccaaggtctccccggcccccagcaaactacctgctatgaagtagatgctctgtaaatagttgttaagcacaaattgccttgtgctatggagactgggcctgacatgagttgtaaaagtatcaacaagtgtattgacaatgggtatcggcaagtctttgcccttcaagccagagagctgctgggcaggacagattatctctgttttctctgtcactgatttactacccttgacttatgcaatgacatcagctaatatgaagaacactgcactgatgacctcaaaataactgaacaaatagtactccctttcccctccaccaatggcatcaacattctaaaaaaatttaagcatcttaataagcggtgtctctgcaaatatatttcttccctgaaaacatgataatattctttgtaatattaggcaatttagagtcccagtgtaactgtacataactctacagaaaaaagacatatctaacaagaactagaattacaaaaactcattatcactgcattgcacatgcttcacacagacatgaatactatacccacatatgagggtaaaaagataagtgaaagtaaaagctatgagtgagtgtgtcagcctgatacattatggtcccaagatgacaggctggccaaaatactccaaaagaacaaacacacaaaaagaaggtagaggtaaatttttataatgtttgtatcctgttgggaaatataatgtaatgggcacagagtgtggactgtagagtcagacagtcaggggtcaagtcctcataccagcacctactacctatacactctggggtagtttacttaacctctctgaacctgtttcaccatctgtagaacatagtggtttcaagaattaaatacgataaatgactaccataatttggcatctgaggcatgtaccaatgacagccagttcactcattcatcccgtaattatgtattgaacgcctactatgtctgtcttgctcaccaatgcattcccagcccctatcacactacccgtcactgaggagactctcaagaactatttgtaagatgaatgttaagtctgtgctgttatggtgcatgcatgctggattgaatccatcctccttctgaccatgggaagaatgccaatcagagtagaacaaagtaggaaagtaaaggaaccttcactttagtgttgaacaagagtctattatatactagaaaaaactttacaaatttacagacttctgaaagttaaatgatgattctattgttagttgatcaaacatcagtcattgaaaatgtagtaatacgttacctcaaaagaaaaaaaaaaggttagagttttcttaacagataattctttttaaatctgtaagaatctgtacgtcactaaaataaaatcctgtctagattattaaaataaactttgttatcagttatattttcatggaaaatattcctgtatatattttaattaatagccacatagatatttgctttttctgtcagatcatgtatccctttaaaaaccattaaagctaaagaaaaaaatcttaaaatataatatttactcattgctaataaagggaacacaaatttggaaagactcaagtgaatattttttcttaatttaaactgagtactttgtctctattaagctaagttaaaagaatttgggaggacaacctatgctaccaagagaataatttgtttctaggaatctgagttaaaagaatttgggaatgcaatctctgctacctggagaagaaagaaatgtcgtgggtcccacaccattctcaagactctgtttcaaagcattgtttcaatacgctgatccaaaccctgataacctgccatctttttaataaaataatttataaatttaatgagaatgtttcactttccatacaaaaaacagaaaaatgctttgaatcaatgcacttactgggatttggattactgactggtgttcctattgattcttgtaggagttattaatcctgattgcaacacacaagtgaacagacaagagagataaattttgtggcttgtgggaaatgaaggaaaatgggcctcatttagtctgtgagcatactaattgaaatagatgtatgaagacttcaccagtgttaaaataacattgtttttataaatcatatgatataaactatataacaataaaatagaatgttaaacatgtatttaatcatcatcataattttgattcagaaatctataatttattagttatcttaataatgtttagaatttgttgaacattttaccttatgtgaattaaggacaaaatattaaagctattcagcacaaaaaaagggtctttctgatgtgtatttttcatagaatagggtatgaatttgttattttgttattttgattaatgtctaaaacaaaagataaacacattatgatataacattactattgattttaatggccccttttgaaatagaattatgtcattgtcagaaaacataagcatttatggtatatcattaatgagtcacgattttagtggttgccttgtgagtaggtcaaatttactaagcttagatttgttttctcacatattctttcggagcttgtgtagtttccacattaatttaccagaaacaagatacacatctctctttgaggagtgccctaacttcccatcattttgtccaattaaatgaattgaagaaatttaatgtttctaaactagaccaacaaagaataatagttgtatgacaagtaaataagctttgctgggaagatgttgcttaaatgataaaatggttcagccaacaagtgaaccaaaaattaaatattaactaaggaaaggtaaccatttctgaagtcattcctagcagaggactcagatatatataggattgaagatctctcagttaagtctacatgaaaaggatggtttcttggagcttccacaaacttaaaaccatgaaacatctattattgctactattgtgtgtttttctagttaagtcccaaggtgtcaacgacaatgaggaggtgaattttttaaagcattattatattattagtagtattattaatataagatgtaacataatcatattatgtgcttattttaatgaaattagcattgcttatagttatgaaatggaattgttaacctctgacttattgtatttaaagaatgtttcatagtatttcttatataaaaacaaagtaatttcttgttttctagtttatcacctttgttttcttaagatgaggatggcttagctaatgtaagatgtgtttttctcacttgctattctgagtactgtgattttcatttacttctagcaatacaggattacaattaagaggacaagatctgaaaatctcacaaactataaaataataaaagagcagaattttaagataaaagaaactggtggtaggtagattgttctttggtgaaggaaggtaatatatattgttactgagattactatttataaaaattataactaagcctaaaagcaaaatacatcaagtgtaatgatagaaaatgaaatattgcttttttcagatgaaaagttcaaattagagttagtgtgtattgttattattaatagttatgaaacacggttcagtctaatttatttatttgtagaacagtttgtcctcaactattatttttgctgacttattgctgttaatttgcagttactaaaaatacagaaatgcatttaggacaatggatatttaagaaatttaaattttatcatcaaacgtatcatggccaaatttcttacatatagcatagtatcattaaactagaaataagaatacacaataatatttaaatgaagtgattcatttcggatcattattgagtttcaagggaacttgagtgttgtacttatcagactctacatgtaagaacatatagttaatctggttgtgtgtgtaaaaacatatggttaatctggttaagtctggttaatcatattaggtaagaaaaatgtaaagaatgtgtaagacgaaatttttgtaaagtactctgcaaagcactttcacatttctgcttatcaactaaacctcacagagatagtttaatagtttaggctttaaaatggattttgattattcaacaagtggccttcataatttctttaagtgtttttctttaagtatatactttctttaaatattttttaaaatttccttttctctagtaaagccagaccatccatgctacctctctagtggcactctgaaataaaaagaaaatagttttctctgttataattgtatttgtaataagcagatgaatcacatttcttaaaatttgttttagagagggtaagctctgactaggaccatgacttcaatgtgaaatatgtatatatcctccgaatctttacatattaagaatgtatatagtcaactggttaaacaggaaaatctggaaccagcctggctgggttttaatcttagcaccatcctactaaatgttaaataatattataatctaatgaataaatgacaatgcaattccaaatagagttcatctgatgacttctagactcacaaaattgcaagagagctcagttgttgctcagttgttccaaatcatgtcgtttgttaatttgtaattaagctccaaaggatgtatagctactgacaaaaaaaaaaatgagaatgtagttaatccaaatcaaaactttcctattgcaatgcgtattttctgcttcattatcctttaatataatattttaagttagcaagtaattttaattacaatgcacaagccttgagaattattttaaatataagaaaatcataatgtttgataaagaaatcatgtaagaaatttcaagataatggtttaacaaataattttgttgatagaagataagactaaaagtgaaattcgaagtggagaggacacttaaactgtagtacttgttatgtgtgattccagtaaaaatagtaatgagcacttattattgccaagtactgttctgagggtaccatatgcaataagttatttaatccttacaataatcttgtaaggcagattcaaactatcattacacttattttacagatgagaaaactggggcacagataaagcaacttgcccaaggtctcatagctgtaagtcaaccctacggtcaagacctacaagtagccgagctccagagtacattatgagggtcaaagattgtcttattacaaataaattccaagtagaatcaacctttaataagtctttaatgtctcttaaatatgtttatataggagtctaatcaccaattcacaaaaatgaaagtagggaaatgattaacaataatcataggaatctaacaatccaagtggcttgagaatattcattcttcttgacagtatagattctttacaatttcgtaagttccaatgtatgttttaggaatatgaggtcattactattcataatctgatacagctttatcctaaggcctctctttaaaaactacactgcatcatagcttttttgtgcagttggtctttctactgttactgaacagtaagcaacctacagattcactatcaccaaccagccagttgatggatcttaagcaaattatcaagcttgtgataacctaaattataaaatgagggtgttggaatagttacattccaaatcttctataacactctgtattatatttctgcctcattccttgtagggtttcttcagtgcccgtggtcatcgaccccttgacaagaagagagaagaggctcccagcctgaggcctgccccaccgcccatcagtggaggtggctatcgggctcgtccagccaaagcagctgccactcaaaagaaagtagaaagaaaagcccctgatgctggaggctgtcttcacgctgacccagacctggtgggtgcactgatgtttcttgcagtggtggctctctcatgcagagaaagcctgtagtcatggcagtctgctaatgtttcactgacccacattaccatcactgttattttgtttgtttattttggaaataaaattcaaaacataaacatattgggcctttggtttaggctttctttcttgttttctttggtctgggcccaaaatttcaaattaggatatgtgggtgccacctttccatttgtattttgccactgcctttgtttagttggtaaaattttcatagcccaattatattttttctggggtaagtaatattttaaatctctatgagagtatgatgatgactttcgaatttctggtcttacagaaaaccaaataataaatttttatgttggctaatcgtatcgctgaattttcctatgtgctattttaacaaatgtccatgacccaaatccttcatctaatgcctgctattttctttgtttttagggggtgttgtgtcctacaggatgtcagttgcaagaggctttgctacaacaggaaaggccaatcagaaatagtgttgatgagttaaataacaatgtggaagctgtttcccagacctcctcttcttcctttcagtacatgtatttgctgaaagacctgtggcaaaagaggcagaagcaagtaaaaggtagatatccttgtgctttccattcgattttcagctataaaattggaaccgttagactgccacgagaatgcatggttgtgagaagattaacatttctgggttagtgaatagcattcatacgcttttgggcaccttcccctgcaacttgccagataagcactattcagctcttattcccagtctgacatcagcaagtgtgattttctatgaaaaattctactatgactccttattttaagtatacaagaaacttgtgactcagaagataatatttacagagtggaaaaaaacccctagcatttatagttttaacatttgaggttttgaatgagagagttatccataatatattcaattgtgttgtggataatgacacctaacctgtgaatcttgaggtcagaatgttgagtgctgttgacttggtggtcaggaaacagctagtgcgtgagcctggcacaggcatctcagtgagtagcatacccacagttggaaatttttcaaagaaatcaaaggaatcatgacatcttataaatttcaaggttctgctatacttatgtgaaatggataaataaatcaagcatatccactctgtaagattgaacttctcagatggaagaccccaatactgctttctcctcttttccctcaccaaagaaataaacaacctatttcatttattactggacacaatctttagcgtatacctatggtaaattactagtatggtggttaggatttatgttaatttgtatatgtcatgcgccaaatcatttccactaaatatgactatatatcataactgcttggtgatagctcagtgtttaatagtttattctcagaaaatcaaaattgtatagttaaatacattagttttatgaggcaaaaatgctaactatttctacataatttcatttttccagataatgaaaatgtagtcaatgagtactcctcagaactggaaaagcaccaattatatatagatgagactgtgaatagcaatatcccaactaaccttcgtgtgcttcgttcaatcctggaaaacctgagaagcaaaatacaaaagttagaatctgatgtctcagctcaaatggaatattgtcgcaccccatgcactgtcagttgcaatattcctgtggtgtctggcaaaggtaactgattcataaacatatttttagagagttccagaagaactcacacaccaaaaataagagaacaacaacaacaacaaaaatgctaagtggattttcccaacagatcataatgacattacagtacatcataaaaatatccttagccagttgtgttttggactggcctggtgcatttgctggttttgatgagcaggatggggcacaggtagtcccaggggtggctgatgtgtgcatctgcgtactggcttgaacagatggcagaaccacagatagatgtagaagtttctccattttgtgtgttctgggagctcatggatattccaggacacaaaaggtggagaagagctttgttcatcctcttagcagataaacgtcctcaaaactgggttggacttactaaagtaaaatgaaaatctaatatttgttatattattttcaaaggtctataataacacactccttagtaacttatgtaatgttattttaaagaattggtgactaaatacaaagtaattatgtcataaacccctgaacataatgttgtcttacatttgcagaatgtgaggaaattatcaggaaaggaggtgaaacatctgaaatgtatctcattcaacctgacagttctgtcaaaccgtatagagtatactgtgacatgaatacagaaaatggaggtaagctttcgacagttgttgacctgttgatctgtaattatttggataccgtaaaatgccaggaaacaaggccaggtgtggtggctcatacctgtaattccagcaccttgggaggccaaagtgggctgatagcttgagcctaggagtttgaaactagcctgggcaacataatgagaccctaactctacaaaaaaaaaaaaaataccaaaaaaaaaaaaaaatcagctgtgttggtagtatgtgcctgtagtcccagctatccaggaggctgagatgggagatcacctgagcccacaacctggagtcttgatcatgctactgaactgtagcctgggcaacagaggatagtgagatcctgtctcaaaaaaaaaaattaattaaaaagccaggaaacaagacttagctctaacatctaacatagctgacaaagagtaatttgatgtggaattcaacctgatatttaaaaagttataaaatatctataattcacaatttggggtaagataaagcacttgcagtttccaaagattttacaagtttacctctcatatttatttccttattgtgtctattttagagcaccaaatatatactaaatggaatggacaggggattcagatattattttcaaagtgacattatttgctgttggttaatatatgctctttttgtttctgtcaaccaaaggatggacagtgattcagaaccgtcaagacggtagtgttgactttggcaggaaatgggatccatataaacagggatttggaaatgttgcaaccaacacagatgggaagaattactgtggcctaccaggtaacgaacaggcatgcaaaataaaatcattctatttgaaatgggattttttttaattaaaaaacattcattgttggaagcctgttttaggcagttaagaggagtttcctgacaaaaatgtggaagctaaagataagggaagaaaggcagtttttagtttcccaaaattttatttttggtgagattttattttgtttttcttttaggtgaatattggcttggaaatgataaaattagccagcttaccaggatgggacccacagaacttttgatagaaatggaggactggaaaggagacaaagtaaaggctcactatggaggattcactgtacagaatgaagccaacaaataccagatctcagtgaacaaatacagaggaacagccggtaatgccctcatggatggagcatctcagctgatgggagaaaacaggaccatgaccattcacaacggcatgttcttcagcacgtatgacagagacaatgacggctggtatgtgtggcactctttgctcctgctttaaaaatcacactaatatcattactcagaatcattaacaatatttttaatagctaccacttcctgggcacttactgtcagccactgtcctaagctctttatgcatcactcgaaagcatttcaactataaggtagacattcttattctcattttacagatgagatttagagagattacgtgatttgtccaatgtcacacaactacccagagataaaactagaatttgagcacagttactttctgaataatgagcatttagataaatacctatatctctatattctaaagtgtgtgtgaaaactttcattttcatttccagggttctctgatactaagggttgtaaaagctattattccagtataaagtaacaaacacagtccctagatggattggccacaaaggcccagttatctctctttcttgctatagggcacaggaggtctttggtgtattagtgtgactctatgtatagcacccaaaggaaagactactgtgcacacgagtgtagcagtcttttatgggtaatctgcaaaacgtaacttgaccaccgtagttctgtttctaataacgccaaacacattttctttcaggttaacatcagatcccagaaaacagtgttctaaagaagacggtggtggatggtggtataatagatgtcatgcagccaatccaaacggcagatactactggggtggacagtacacctgggacatggcaaagcatggcacagatgatggtgtagtatggatgaattggaaggggtcatggtactcaatgaggaagatgagtatgaagatcaggcccttcttcccacagcaatagtccccaatacgtagatttttgctcttctgtatgtgacaacatttttgtacattatgttattggaattttctttcatacattatattcctctaaaactctcaagcagacgtgagtgtgactttttgaaaaaagtataggataaattacattaaaatagcacatgattttcttttgttttcttcatttctcttgctcaccaagaagtaacaaaagtatagttttgacagagttggtgttcataatttcagttctagttgattgcgagaattttcaaataaggaagaggggtcttttatccttgtcgtaggaaaaccatgacggaaaggaaaaactgatgtttaaaagtccacttttaaaactatatttatttatgtaggatctgtcaaagaaaacttccaaaaagatttattaattaaaccagactctgttgcaataagttaatgttttcttgttttgtaatccacacattcaatgagttaggctttgcacttgtaaggaaggagaagcgttcacaacctcaaatagctaataaaccggtcttgaatatttgaagatttaaaatctgactctaggacgggcacggtggctcacgactataatcccaacactttgggaggctgaggcgggcggtcacaaggtcaggagttcaagaccagcctgaccaatatggtgaaaccccatctctactaaaaatacaaaaattagccaggcgtggtggcaggtgcctgtagtcccagctacctgtgaggtggagattgcattgagccaagatctcaacactgcactccagcctgggcaacagcgtgagactccacctcaaaaaaaaaaaaaaaagaatctgactatataccatggaaaagccaccactctgccacttaaataaacatcaggatcagagattccaagaggacaatctgcatcaagtcttcaccaagtgttttttaagcgaaataatgaaatagggagcagaatatgcctgttgcccatagaaacgaggtctattcttgtcctcaattaggcttttttttcttcatagttacaccagaactaaagtaaaagtggtttttctgttctttctacttctccccatgaaatgggcatatcatctcaacacttcactccaagtcgccacgggcaaccttatgaccctaggtcctccacccctaatgtatcatcattgccacccatttttatggtacttattgttcttaagcttatcctcttaatcttttcatgtaagcaaagctcattaatttctgtcttggaaatgctactactctctttaattactcaccaaatccaactttaacttttgacctggtttctctgccacaagttctgtcccactggagcccatactcacctaccgctttgccatcacatttaacagaaaactcttatcaacttacttcctgcttaacattagctccttcctatctatatccaaatttcttaaattcaaattttttagctggagtaaaaatggtcccagtaccatttcctgttcccttcactataacctacatttttgtcacattaagtttttccccattccaggacaggtcaggccctttaaaaatttcaacagctttattgagatataattgatataatttaaaaaatcctgcacatgtgtcatgctggagccctattgattccaacagggatggcgccttgtccaagaagagacccagagccagtgaatgggacatagggtttatttaggacttaaatacagatgtggtccagtggcagtgggctggacaggaccgctactatttgtaaagagtatgtagtttatataacatttctacttagcactctccacttagcaacctccatttaacccaaaataaaaggccttggttccttgcacatcctgagttccaacggacaggcagggagttcaagtgtccttcacagataagaagtgaatctctctgggttggccattcccggattccttagcttagactctgaacacatattcttcttagaccatacagtcattctcagggtatgcttgagttaatgctgtcggatgcatctgtcatacaaagtgtttaacatatacgatttcatgattttggaaatatgcatacacccatgatatcactggcacagtcaagatattaaatatatccatcacctccaaaagtttccttgtgttcatttattttagtttttcatggtaagaacatttaatatgaaatattatcaacaaatttttaagtgcacaatactgtattattaattttaggcattatgttgtacagtagatctctagaacatattcatctactaaaaatgaaattttatctccatttccccctacctcccatcccctggcaactaccattctattttccactttgactgtttcagatacctcatataagtgaaatcacacagtatcctttcgcactgttgtggggatgtaaaacggtgcagctaccatgggaagaaatgtggaggcccctaaaaaattttttaaaaaattctgattatcatatgatccagcaatctcacttttaggcatatatccaaaagaactgatatcaggatctggaagcaatatttgtgcatctgtggtcattgcaacattattcacaatgttcaggtccttttatatgatgccctcattgcagcaatgtcttcctcccaacaccatctgacaaactgctatttgtttttaaacctcactttaactgtcaccgcccagagaagactttctaaaacctttgggcaaattttattactttttgacaatgaatgcctgaggcttatccagctttgattccagaaacatcagcctgtcagaatggctaattttcatgcatttgtgaatgctggatggctaaatccagtgattttcaaagtctcgaacatcctctttttaaatgtagaacccattttccaataaagccacaaacagaaactcaacatgcaaagttcttgaatatggaacttttggggcaatactgagagtcgcaaaagttcactgaatgaaaaatgcgggttgggaagactgcagtcatcagacctttgctcactccttacgtgttcacagaggatcaaatgaatccctagagcttgaagtaatgccatagaagaaaaaccactaaagtagataatctgatggtcaattcttagttaatgtacaaatagaaaaaacacagagaccactcccaggtaatatgtaagtctatctagaaagaaatgcactttcttggctgggcacagtggctcccatctgcaaacccagcactttgctgggatgaggtgggaagattgcttcagaccaggagttagaggccagcttggcaacatagtgagaccctggctctactataaaacttgtaaaaacaaacgaaaatacagtaacgaaaaaagaaatgcactttcttaaggtgtcatttggtaagaaatgttatgtgtctgattttgcccatgcacaattttgaatataataaaaaaggtagcttcccctatttagaatatataaaacagtaacaacaagattgtataactcatgattttaagatgataatagaaagattagttgaaagtttttaatcccacactgtggtatgagaactattttatttatatatatatatacatatatatatatacacatatataattatatatatgtatatataattatacaattaggactgaaagtctgcaacaaactataatggatgtatgcacttgggacataagcttctagttcctctttatttatgaaccaagagaaacagctaactcagggattgtttttaaactgactacagattcccaccatggggcaaaaatatgggtgacatgacacatcaccagctgcagtagctcagctcacatttctgtttaagcattacacacataatatcctgtatgctgatcatttaaacttactgacgcttgtaatcccagcactttgggaggccgaggggggtgaatcatgaggtcaggaaattgagaccatcctggacaacatggtgaaatcgaaacagtgtctctactaaaaatacaaaaattagctgggtgtggtggtgtgcacctgtaatcccagctactcgggaggctgaggcaggagaatcacttgaacccgggaggcagaggttacagtgagctgagatcacgccactgcactccagcctgggcataagactgagactccaagtcaaaaaaaaaaatgcagatttcttggtactaacctaggtttattacatcagagactctaagggcaaagagcctgagtctccattttaaaataaatgtccctgagagtgactgatcactggttggatttcagagttactgatagaggctacatttgtatttacctgagactcccttgatatttcttacctactatccttttcactcaaatggtgaccatgaggcaatattttgagcaaatagtcatccttaaagttaccttgaataacttcatggtgaccactgcctatgtttaagaccagacttgggtttaacatctctccaaatgctagaatcactatttccactatacttccgctagtctctggtgattctttggattggacttcaaattctcttgcagtgtagaaaagaattacagatgctacctctcatgtgtacatagagctgacatttcagtttttgaattccatcctcccccctcactattgcatgtgatctgatgctcttgcttgaacttcttgtggtgtgcagctctgcaccaaatagcaatgaattggtacatagtaatgcagacacatggaaagtggaatcactgattttttttttttttttttaagatggagttctgctcttgttgcccaggctggagtacaatggcactcgcaatcatggctcacagcaacctccgtctcctgggttcaagcaattttcctgcctcagcctcccgagtagctgggattacaagcatgcaccaccatgcctggataatttcacatttttagtagagacggggtttctccatgttggtcaggctggtcccaaattcccaaccccaggtgatccacctgcctaggcctcccaaagtgctgggattacaggtgtgagccaccatgcttggccaactgacatttattttaacaacattagttgtggtattaaataatgaaagtagcccgtattctttgcagacattttgggaaatatagaaatgattagacccatttataatttcaacacaagcagtggaatagctaataccttcatttatgttttttgtcttaccctgtacatgttttagtgcctgaatttttcacactgagtcacaaaaagttttccatattatttaacattcttctatagtatcattttctgtaatttgctttttaatggccatatgatattccattatgggaatttatttaaacgtctcctctcatttcacatttaggttttttccaacctttttctattaaagagagtactgacattaacatccttctccataaaccttttgtgcatatatattatataatatattgtatacattatttataatataaatttattttatattttaaaatatttattttataacatggtttacacattataaatgtatatttataatatttatttatttatttctaggataaattacttgaagcagaatatctggaggaaataaaaggttttgggctcagcgcagtacctcatgcctgtaatcctagcactttggaaggctgaggtgggaggattacttggcccaggctgcagtgagccctgactgtgctactgctactgcactacagcctagatgacagagtgagaacctgcctcaaaaaaaatgtttttggcattttaaacttaaaaaaaaaatatatatatatatatagccaagtaactctccagaaagattgtaccaatttacctttgatgcacagaataacatatttaatttttattttgcttctccatcactaatattatgattaaaatattagtaattactttaattttaatatcttgaattagtagtacaagtaagagatttaaaaatgtttaatgactattttactatcttctgtgaattgcctatccacgtcctttgctcaattttcttttttttcttgttttttcttctcttctcttttttttgagacaaggtctcgctctgttccccaggctggagtacagtggcgtgatcttggttcactgcaacttctgcttcctgggctcaggtgattctcccacctcagcctcccaaatagctgggaccacaggcatgcaccaccatacctaactaatttttttgtattttttgtagagactgggtttcgccatgttgcccaagctggtctcagactcctggactaaagcgatctgccctccctgacctcccaaagtgctgggattgtaagcatgagccactgcgcctggccctttcctcaattttccattagcaaagtcatcttttatatgaattactcatttcataatatgtaggatagcaatcagaaacatggtattttcctctatacaaatattttaatttgtaagtaattacactgggagtcatatacttatgcaaataatcttaactggtacggatattcaccatcagacactttcttttcttctcccagccaagatgtgatgaacaggcaatacatctttttgtttgttttttgattcaattatatttatttctgccccaaactttttattttgaacagtttatactctacagagaaattgcaagaattttaataaatacctctctgtccttctcctagcttcaccctttgtttgttgaaaggagatactttagtgcagtattgcaacagcttatgtagacatgcaaccttgaggtcacagacctatgagggattgagacaaaggcaaatttagcaaatattttccagagtactctgctgcaataaccacgtacccaccttcagcaatgacctggtgaacagggagactactgcttagtaacggagcaattctcagctcaaatctggcaggttctaagttttcttgcctctgtggttttgaatggttgctcttactatgtgaaaatggaagacatcatgtcctgttcatgtttaagaattaattgagatttccccaggggcaaatacttcacgatactgctttcctcagtgatatttaatgcacttcctgccctcatccccaattaattaagcattttcctctatacaggagatttatgaagtacttggaattccattaaaaagaggtaatatgtgacttaaatgaatgcataaatacatcaaatataagatatctcagaaatggtttctgtgtgaattttgttatccacaagcaacttgtattattttcatggctacaagaaatttcaatgtggctgcttcccaagctgtttcccaagcaagtaataaatgttgtattactttatttgaatataacaaagctttaatttatgattgcatgtgcttacattgacaccttggcatttcccttcaggcttttctggacatgaaaaagatgagtgaatttggctggatgggtctttctgttctgattcaccagctgcaccccaagcatcagctaactaacttggaaatatattttgttttggtggggaatctatgacaaaatataattagatcagtgataccactgggccaataatgaaaagcaaatgctatgtacaatagtgtcatgtttatttatgaagtgtagtatcattatcccagaatgaataatgaatgaggcatggaacttaggtggttagaacctgtaagaacaatactgtgggcttcatccccaggtgtcctccttatcatcacattatttcacctccttaaattactatttactcacctgaaaaatcagttcataaaatgttctcaccttcattaaaagaacactagtaataattgatttccattaaaagtatccacatatttggggggaaacttgtaattctttattctaaagagtttccaggaactgaaagtaaatacataaacacaagacttggattaaaatgtaaataatatcttttaataagaacccaacaaggcatcttaacttcattatattatgcattctgtagaaagttcaaaaaagatgataagttccttgttttgttttgtttgagatggagtttcacgctgttgcccaggtttgagggcagtggcacaatcacggctcactgcaacctcaaacgtgatctcctgggctcaggtgatcctcccacctcagcttcccgagtagctgggatcataagtatgcaacaccacatgcagcctatttatttatttattttttatttatttatttatttatttagtagagacagcatctcactatgttgcccaggctggtcttgcactcctggtctcaagctatccttcttccatagcctcccaaagtgctgggattacaggcatgagacaccgtgactggtcccaaaagttcctttttaactgttagattccttagctcacaaaaatttgttgagtcattattatgtgtcagaccttgtgttaagtactagatatcaaatacagttcctacacctaagaaaagaataacatatactatggtataccaaaggagaacatcaaagacagcttcaggctaaaggatggagatagatatacctggaagtaaaattaaaatctagccagatgttttttctattcctgactcaggattaaaaaccccacttcaacacttttctctctagcagaaatatttaaaaccatgtcttttcctggcaagattttcacattcatatctgttttgttcattaatccattcattcaactaaggactaatttgaaatggatagcctgaatagaacttgcatgttaatggagggataccatcttatataagtaagggagcaaaagttaaggaaagaggaaacaataatattttaatgtaaatgtaaaataattaagttttaaaatttattatttataagaaagtattctaaataagacgaaaaataaatcttgaaaatcaagggatatataaaacttaagaaaagggaaaacaatggtaaaataaaatcatgtttaaaaattcatctgttattttgggaaagtcttccaaacaaagtgacaaaaagtatgttgaaaatgaaatgacatgtcaagatatgtaggcaaattcaaagaaaagaaaatcaaaagtgatgacaatgttgctatttcaccagaaggaatttaattccaaaaggagaaatggaaaaaaaaagagaaacattatgtaatgatagaaagtacaatttgtgaagaagatataacagtcataaactttcatgcactgtataaggaaggagccaaccttatgaaacagaattcctaaaatgcagagaccacacacatgcacagaaccacagagtgaggtctttttatacacacacacacaaaaacatgatgaaaatctcataactataatcccagtgctttgggaggccaaggcaagaggccaggagtttgagcctccagtgagctatgattgcaccactgcactcttccaccctaggtaacaacagagtgagactctgtctcttacaaaaagatacataaaaaggaaaagatataggatatttaaataacaccatcaataggcttggtaatatggaatattataacatatgggtgtgataatatacattcttttcacctatgaaacatttgcaaaagttaacgcaacttgttcacaaagaaaaccttaaaaattctatactttgggagacagagacaggaggattgcttgaggccaggagttcaagatcagcctgggcaacatagcaagactctgtctctacaaaaaatgaaaaaattagctggacgaggtggtgtgtgactgtagtcccagctcctcaggaggctgagatgggagaattgcttgagcccaggaggtagaggctgtaatgagccatgattgtaccactgcaataaaattaattaatcaattaattaagaaaatctaaaatgcttagaatgaaacagttggttaaattaacaaaatttataaaatacttgaaaactaatgattgaaagatgactcactctaaccccctgaaaaaataacaaattgggttttaagacgagaaaactggaaattaagaaaaacttctctaagtagtcccagaacaacaaaataaataaaaattaaaagtacaattttacagactaaaaaaaaaaggaaaaaaaatggggaataggatggagactacgtcttccaaactctgtacttgaaatgtgagcaaggaggtgtaagcacaggagagagtttagatatagatcccaagaaaatcttatagaaaaaagttggcattttaattctatggacaacgaatgctttctttattaaaggatcccagtataactggctacccattcacaagaagataaaagtagattttcttcatgacatattaaaataaattctaggttaaatatatacatgcaaaagaaaaaacaggaaaaataaaaaacatttaaaaatttaaggaagtatttgaaatactgtataatcttagaatggggaaacattttgtgtaggacaggatgcaccatataaatgagctctgtcccaaaggagttcataacctagtgccacaaataatataaatatgttagaggtagggatagaatatgctatttttgagataagaacaaaaacagtgaggacctagaggacaattcaattcattctatgatgggcactggggaagggttcacagaagcagcattgagctgtttttaaaggagtgaatgggtgtcttctaggtagtttgtgaaaaggccccaaatcattaaaggacctggtatttcagtgccagtgagaaattcagtgtaactaatgtgtagaatgaatgattgcagaggttgaaaatggaccaatttttgaaagagtttatattccaagctaagaagttttaacttaatcttaatgtctgcctcctgcttaaggccactgattgtagttgaagctatggtgattgtcagatcaatcaaggagaaagagaagagcgagaaaatgtttggccaagactggtaattgcagacttccttatctattctccctcttttccttattagcagaatcctgattttagttaggatagtcttgtacccaagctaatagtcaacttgactcagcttctcctgcaactgagcttatctatgtgactaagttgtggctaatataagcagaagtgctgtttagaacactcaagaaagttccttaaaaggagaaggtactcctttgcccttctttcttttctccttcttccagattgccagaggacatgatatttggattacaagttgaaccaagggatagaagtcttttattaaaatgacggctttctgaagactatgtggacatactcctacataggcttttttgtgagcaggaaatgaatttctgccttgttgaagtcagatgtaccaaacctaatcccaaatgataaagatgagtaccaatgtaaatgcaatgagaaacccctacatttaagaagtggtcagagaagaaattaccagttaaaaacactgaaaagagtaagacgggaagaaatggtatagaaaccaagacaaaaggacaggcccaagaggcaggataagggcaaaataagtagcagatgtttaaaagagagaagtagaaagaggcttgaatgcagcacatttaatttacaattgcaaagttgtgttgatttgagatcaatttcaagagtgtggtaattgcatgaaaaccaagttgaaatgggcttctgagtgaataagagtcagggagctaaattaatatttaatttcagaaaaaatgaaataatttcagaaaaaatttcacctaaagataaggtgaaatggaaaatagatgtttcatgtcttttctgacaaccaaattgtatctccaattctcatgatcctgctaatattggctaccatttattaaattaaaagaggtttatctaatcctttgataaactcaaaatcttctgaataactagaaatgaatggcccttcccgttcataatcactttcattccaggaaccatttatattcctacatagtatgctattctggaaaacaaaatattttctagtctcaactcaaattctgtcaaggcaata

SEQ ID NO: 350 - DNA, 28617 bp, Homo sapiens
gctgggctctctgccccatgaacaggctgtattgtaagctttggaggagtaggttttgtttagctggaaaaccatgcaaattaataggcatgatacgagtatcattttttaaaaagcatgtgacaataagcgtatctttaaatgtgcaaaactggaaaaaagatggaagaaattttcagttgcttaaattataatctgccgtgcattggctttttctttttgagatggagtctcactctgccacccaggctggagtgcaacagcgccatctcagcttactgcaacctctgcctcccgggttcaagcgattttcctgcctcagcctcctgagtagctgggattacaggtgcccaccaccatgactggctaattttttgtatttttagtagagatagggtttccccatgttgaccaggctggtcttgaactcctgacctgaggtgctccacccacttcagcctcccaaagtgctgggattacaggcatgagctactgcaccaggtttgtctttttcctatagataactacatcctatttaccttagctctaatgagaaggatgtttgatatatctatccttttgaagttaatgtaatataaacatttaaatataaatgttaatataaacatttgaatgcaggaatttacacatttgttatgccataacttttggcatgactagaatagtttttactagttttaatagctttatttgtgtggtatataatgtatacagaaagagtagaaattctatagctatatgtttcagttttaaactatatctactcatcacagcttccacaggaaaagtaaaatatataaccagttatctatatatttgcaattgtataaatacaacttaaaaatacaaaacaaaacaacagtgttattttgaatggaatatttgtcttaccctgggctgacaccagaaattaaatgcattgatttctgagagcagctcactcattcactcatttgtctaaatttagcaatcatttatcctatgtatattatttctctagtcctgcatactatgtgcttaagataaaaaggcaaacaatgtatagtcttttaccttcaagttgcttacaattggcaagcaagtcaaatacgttatgcagctgagaattaagttaaactatgtaaacttgacatttttgtaggtcaaaacaataatatctacagttttatacggtttaatctaatataaaacaatggaaaaaatctgtaagctatatgctgagttctgttagaacacacagcagagagtgttatatcacttacgtattgctttttgttttgtttgtgtgagatatttcttaaaaagtcagatttaattcaggtctcaaaatacaagatgtttctgaaaaattcttatgtcatctatcataaaaatctacatgaatctgtacattctttccaaagacatttggtatcctaataacaagaagataatagtactttgacaggaactattttgttaaaacaatattaagtgcattcttggaaagtactaaaattatcttctaaattttgaaatgactaaattataaaaatttacaagattttggcatttataaatacagtctgatctgtaatgaattcactggacaacattggcaaagctatttaactttctgtagtttttttatttttcttttttttttttttttttttttttagagacagggtcttgctctgttgcccaagctggagtgtagtggcacaatcatggcttactgcagcctgaactccttgggctcaagggatcatctcacctcagctgcctgagtagctgggattaccagcttgtgtatcttattttctctatttgtcttgtgcacctcaagggtattgcaaaagtttgtctttaccaagctgcttactgtgaaaggtaaatgaactggtaggatgacctatgtaagtgtgactaatggagtgtttaatgtttattttcagaactcatcaattttctgacctcaaatggtttccccagaagttacagctgcaaagataaaataggaatttccttaatacccagaagtgattctgagttgcacttaagaaagtgaggaggaaaaaaaaagagctttttgtgatcgtgatttattctatcacactgttatttctctttaatctctttcttcaggaaagacacccattttattttttgtagttgaactgactttagattaatgaccacttaattgaataactttttatcatttttgagattaaaatctattctgttccaataatataataataattctgtttttatccttaggcataattttcatggtcttttacttaagcacttttaatcaagttctcattaagtagttatgagagtgtgtgtgtgtgtgtgtgtgtggagagagggagagaaagagaggtgaaagtagagtctttgagtttttcttactgttttatctcttttcatgtttaactgcagtatcaattacataattcatttttcaagattaatttatcttacctataatgtgcgtgatctagatttactaatttttggcacttaacgtatattaaaacttaaatgctagttttgaaaagtaaaaccattatacagataatcaattgatgtattaatatcaacaacatggattcattctcacatcatatctattaaatccatggtattcagtgcattgctggatggtctcactgtggttcttctagtaaagactggcaaacaaaatctaccggttggtgttggtttaacagtgacatgttaaaaattggagaaatatcatctgcaaggcatgtggaatttccacaaacaaggaattatatgaaaaaaaggggtaagtcaattaccaagatccatataattatctgtggtatttattgggccctatattaatggaagattttacataaaaattttacttagataaaatttgacaaaaagttaccaagaaaaacagtagagaaacctaaactgagggacattttacgaaattcatgactggcacaccagaacagacttccttaatttgtgaaggttgtgaaacgacaaagaaagactaagaaacagggaaccagaggtgactaaggagatgtgacaactaaaggtaatgtggtatttggatgggatcctggacagaaaagggacagtagtgtaaaaattgttgaaatctgaataaagtgtgaaggttacgcagtagcaaggtacctgagttggtttcttagttttgacgaatgtactatagtaatgtaagacactaacgttaaagaaaactggggcagggcgcggtggctcaccccgtaactggggccaggtgcagtggctcacgcctgttggggccagggatggtggctcacacctgtaatcccagcaatttaggaggccaaggtgggcacatcacctgaggtcaggagttcaaggtcagcttggccaacatggtgaaaccttgtctctactaaaaacacaaaacttagccgggtgtggtagcgggcgcctgtaataccagctactcgggaggctgaggcaggaaaatcacttgagcctgggaggtggaggttgcagtaagccgagatcatagcactgcactccagcctgggcaacagagtgagactcagaaagaaaagaaagggaaagaaggaaaggaaagaagaggagaggagaggagaggaggagaggaggagaggaagaaagagaaagagagaaagagagaaagaaagaaagggaactaggtgatagtctagtgaactctgcatagtacctttacacattttctgcaaataaaaacatgattccaaaattaaagctttatttgaaagcaaaagcaagcaaatattaaagttataaaattttatttccaaacttaacataattcaaaccccacacagcaataccaatcttaagagtaaaaaacaagagtaaaaaaaaaaattttgttttattgtctctgaaacagttacacatattatctcacttgacccttatcacagctttgtgatgtaaggaggacaaattatgaaggaaaacatttccagtccaaggtctcttaaatgttaggtcatattgtcttaatgtcacattttaactattcgtcccgaaatatttcaaagaagccactttcataacagagtggaatctgccctcctatgtttatctaagtagagtcaacatttagatttatttagtgaggattctctacttgcctcagttcacctcatgctttaaagttgccagtagaagaaaatctgggtgaggatctgagaaataggagtgagggccaaggatacggattttggatttgggaaacacatttttgacccagctgtagacatgattaaatgtcatgatcctgaatttaccacgatttcttccttcaaatatttcccaatgaaattgaggtgagcaagagcttaaaattgtgccagctacccttcccagaaagctttccaggttgctacagagcagtgttctataagccatggttgagtctaccatcaatgcccagaatgagccaatggcaacaataccatttgggccaaagctcatgtttatgataaccgttagtctatcttttaactaattttttttttgagacagagtctcactgtgtcgcccaggctggagtgcagtggcgtgatttcagctcactgcaacctcccaggttcaagcgattctcctgcctcagcatcctgagtagctgggacaggcacgtgccaccatgcctggctaattcttgtattttttaatagaaatggggtttcaccatattgcctggctaatttttgtatattttaatagaaatggggtttcaccatgttgcccaggctgttcttgagctcctgaccttgtgatccaccctccttagcctcccaaagcactgggattacagacgtgagccatcacgcccgtccccttctttttttttaattttttttttaattttttttattttgaggcagggtttgctgctgttgcttaggctggagtgcagtggtgcaatcacggctcacagcagccttggcttcctgggctcaaatgatcttcccacttcagcctcctgagtagccggcaccacaccattcccagctaatttttgaatttttctgtatagatggggtttctcaatgttgcccagaatgatctggaactcctgggctcaagtgatcctcctgccttggcctcccaaagtgctgggatcataagtgtgagccaccatgcctggtgtttttttccttctcaaagcaaaaaatattaacaggcttccagtatatagatcattagtggagaataattacaactgatgtacacttttatggggtgagttaattctgtaacaaacatttgttccaaaataatttgtgaaatctctctcctgagaatcaatatcatcaaaactatgttctctgattataatgcaataaatttagataataattaaaaatagaccgttgaaaaactcataaactttagaaccaaaaagtgttcacttcataacccttgggttcaaaaggaaatcaaggaaaattatgaaatactcagattgtagatagatcttttttttttccttttcattctgctttcaaaccacaaattcatgtgtggatagatcttaaaaacacaatgctgaaataaaaaagtagtaagtatgatgaagacttcagcagtgattgtcaaaggatttgtggtgaaggactagttttattaaaattctaatcagccacagaccaggtttttatagaattcaataaaaataattactaaaaaaatgaaatgttaaaaagcaatgatattcaaaatataggcccatatttttattatgagatttgaaagatataaaattctatctcagtaagtatatcagaacaaatataacataggaaaaagtttctccctgctaattctcaatttttgtacttagtgcagaaaagtaacagaagtttcgggaccagtattctaagtaacactaacttatagcataatgtcatttgcataatttaaaaatacatacacacacaaaaaaaccatgatttataagaatgcatacaaataaagaaacaaatatcaaacctattaaggtgattgtttattaaggggaagatggaacaaaaaggaaatgtgaataaatgagaatcaatcaatcaacagagcaatgagaatgatgtactgggagtgtggtaacaacttctgtctctgcacgcatacacgcacacacacacacacacacacatgcacaaacacaaagagataaatgaaacgtagtctttcccacactcttggtctctttcaccaacttatttatttatttattttgagatggagtgtccctctgttgcccaggctggagtgtgatcttggctcactgcaaccttcgcctcctgggttcaagtgattctcttgcctcagcctcccaagtagctgggactacaggtgtgcaccaccacgcccggctaattttttggtatttttagtagagacggggtttcaccatgttggccaggatggtctcgatctcttgacttcatgatctgcccgcctcggcctcccaaagcagcttattattttccatccactttgactcatcttactatctttaactttttctccctctttgagctacatcaaagtgataagaaatcaacgggtacacatatttcccacagggttaaatgtgtattttgttttcacccttttcatctgaataaactgaaggtatctattataaataccttggctagtttatactaattagaatcagagcaaaagaattttggatcttggaaagatttcaactatgctgtccatacatttattttttcatttctcgctcactttcaacccacccacaggtatgaaacagaatcttcacaggtatattttaaaatcttggtatttggtcaggaagtcatcaccctctctgttgattcaagaactctgctctgtagttgtatggtttaaagtcacagtatcactacacctgatctcttcctttgtagatgcttccctccataggtttgtcacggtgtaagacactacacatctgctttgcacttcgcctcactacttttcagtgactagagtttttctgtgtccgggaaaataaagaggagggcttagcaatagtcacctgtgatttgagctgtgaaaaaaatatataatctgtctctgggagaccccaaactctttttttcacttaaaaggtttttttggttgatttctcaacataaccctttcaattgccactttatttgaggagacatgatgcaactgagtctagaagggtttttcatgctttagttcttactgtaggctttcagtgctcaccgctggatattaataactaaacaagtagaattttgaaattcttttttttgtctctgcctcactgggttgcaaagtgaaccacaaaattaatatgtactcgttataacaagccaaacaatgcagagatatctaaagaaaaagttagtagcctctttctaccaatgaatgctggattattcaacatgcagatcaagcttgtactcaggatacctacaaaaatcaggagactcctaaatgtttttgaaagaatgctatatttgatatttcagaagaagaattggacaagtgataatgggagacatcaggaatctttagacttccttatatttattttgtgttttagtatttttttgtttttgagacaaggtctcactcactctgttgcccaggttggagtgcagcagcacaatcacggctcactgcaggctcaattccccaggctcaagtgatcctcccacctcagttttcctggtagctatgactacgggtgtgcaccaccatgcctggctaacattttttggtattttttatggagacggttttaccatttcgcccaggctggtctcaaactcctgggctcaagtgatcttcccaccttggcctcccaagtgctgagattacaagtgtgagccatcatgtccagccatgttttagaattttcatgtaattatatattgtggattggttgacaggagaacgagtatgtacaaataaggatatatgtcaagattatattttgttcatgaagtatatgtatatacaactttacataatttttattttagaattattcttacatcttaaaatttcacttattttgtaaatatttccatattcataaaaagctattgtgcttatataatccttatattctattttatttactaataagctatcttgcttgtccattcttccactgttaaatattttcttaatttcctactaatatgaaatttacatctatatttttatttctgtatataactattttcttttttaaaaatgattttcttgggataaatcactagagtgatattgcatgaaaactcatgaatattgtatatctctttgtagctatgaccagattgctcacacaaaggattttataggttcacaaagggtaaactgtatgcattctggctttagaagtggtttggaggaggatgagatggtagcaggagaggctggatgtaagaaagggaacaggaagtgggtgattgcccttatcctggcaagagatgtatctcaactacaaaggtgacaatcggtatacaggaaaaaagtgaatatgataaatatataggaggtgaattcagcaggcttgatgagtaattggatatagggaggtagaaattggatatggggaggaagattggaggatgagtcactgttttttttgcatttgaggactggatggagtagaacaggtttgggagagtggagaacactaagcataccatgtactatatccccaaatccaacacaatggctaccacaaggaaggcattcaataaatgttaattgaataagtgcttcatgcatacatgtatatatgaaggctgcaaacaatgaatcaatgtttctattttccaaagcctcccacgtcttcggttgtatatctagaagctgacttactgtttttatctcttcaataggatatcttaaattcagcactcctgataacaagaaagtgaaaagattaagaaggaaattgtgggcctggcatggtagctcatgcctgtaatcccagcacttttggaggccgaggcaggaggatcccttgaggccaggcatttgagaccagcctgggcaacacagtgagactctttctctacaaaaataaaaattaaagaaaaattaggcaggtgtgatggtgcactcctgtagtcacagctactcgggaggctgaggaaggaggatcacttgagcccaggagttcaaggctggctgcagtgagctactgttgtgccactgcattacagactgggtgacagagtgagaccctatatccaaaaaaaaaaaggaaaggcaagaagaaagaaagaagtgtgaaaagaaagagagtgcaaagccaaagctcaggacttcggaacaaccagacccacctcataaaattagccaattacttcccacagtcagccttttgctaagttatgtagatttagctattccttagaaagttggcgaatgaacctgaactcaggctgctaaaaagtcaatatccctgaatcagaaggaagagatggttccattcagctcacctcatgactagtgagagatagggcaaatagctccctaaagctctctgctctgagttgcagtcctttcagagtgaccaggtcccaccacaggtgtttggagctaaaaggttctgctgggagactccccaagcagctttcctgtctccagctgcactttggatactatgcatcttggttgtgtggctgtgactcctgcttagtgattatgttcttgtatagagtattgtcagtttgggttgctgtattttcctgtatttgtcctgtatctcctagagggcaaaagccataattgctatttcctttgtaactcccaaagagttaggcataacatttagcataaaatgaggactcaattactactgatggttgcccaattgtaattggtaaattggcaaaaagtggtggtttttaatggtcaataaaggtaccatgtatctagtcttaggaaacaaaaggtttattgaaatgcatgtagataaattatcatcagcataaaactgttatggagttttcaacatggggtcttttgctcttaaaatgaagtgaagctttgcaagtccattgtccaataggaaaaatattatatctctctgttcagataaagtcctttaaaaaagtaaatctcttttgaaacggtcttttaaacgtctccagcctgtgaatatataacaaaacaaaaaccatattaaaaagacataattttctccatttaaaaagaagaattaaataggaatgatttaggggtaataaacaaggaaaatacctgggaatttgaaactctaaaatgttctcctattttattaagtacatactaaaatatttgatataatgaaaataatttacgaagacaaaataaatgacaagtggtcataaaaatgcaaataaagtcaatcattttattattatatatttaggaacaaagttgaaatgttatctcctcaaataaacaatttttaaataactctgatatcagtaatttggaaatacagtcctaaatgagttttaatttccattgaaggctaaatgtccttaatagaagacttgaaatcaataaatatagtaagagaaaaaaggaagaaactttcagagaatttctgaaactttgtgggtcaatagaagttagcagttaattttctacaaatcatcctcagggtaaagtgagtcatattctgtttccgcagggtgctctggtctgacctgtttggctccccccaggtggtgttgctgtccttctccaattgtgagtctgttgaatgggattatcttcatagtggttttcttcatggaataccaccgggttttccaagtggcccaaataatgccattatcataaccattaggagtagatgcttttgagtaagtgccacctaaaacaagtcgtagatgtacatatcattattctggaatctttttacctctgcaagtctatgaagagctgtctattacgaagtgcattgccagttacataaaatttatagtattatctgctaactgaaaatatctccaaagattcctaaaatatcaatttataaaataaacatattattaaacaacatctgtgctgtgactcatagtcacatccacactttaaatttattcactactagtagggctagaaacccaaagttccctaattggcctctgtccctaagcttatccatcccggactcagctgctgtggaccatctttcttcaggcaggttagaagagaaggagccacaaaattcctgatgaggtcaactcaggttatttgaaagcacaattttgttggttgattgaggagctttaggaaatggttctggcatgttattttatgtctccattttaaagtgcagcctctgttgatttgccttctccttgtcctagggaagcagatctcatgtaattctgtaaaaggcttgtcagagcacaacactggcatgaactacagctctggcatggcgccccgggtcacacagatcaagcattttcccttagagtttcttctcattatgtggtttgtgagtgcaaagataagttatgtttctccaatttaaaaatattgtgaaaatcaaactgttactttaaataaactgtgcaaagtttcctagttggtgattggctaggacatcaggaggtaaggttgctcatcttggtagatgaggagactatggtttgctacaagcccggagtggtttggaacactggtttcactcatctacccagcagatatggtagggaagtcctactgatgctaaacaggtctggtctgactgtttggctttcccagggtggtgttgctgtccttctccaacggagagtctgttgagtgggattatcttcatagtggttttattcatggaataccactgggatttccaaataatgccattattgtaacatggatcctttagcatcggtaaggcttccccacacataactgctgggtaggtgagtgaaaccagtgttccaaaccattccaagcttatagcaaactatagcctcctcatccaacccccatcctaaaataagtgtctactgtcctcagactggtctcttctctcaagctttcacaaacccctgcccttaccagtgcttgccttctctttattctgttcctccaaacacctgttcactgcgtgtatctgacacaaagctcatgggaagccaggttaatgtgtcaacaagcatccatgtagtaatgttaatccatccagatcatttatgttgtatgtctaaaggagatcccacaacccacagtgccagctatgatggtgatagtttcacatataatgccaaactactggatattttgcagcaggtggatttctttagaagggctaattttaggcatgaacttggtattatccacttccagtttcaaagaacttagttgaaataaagaacatgataaaatccctactatctttataaattattcttcatttcttcatatctatttattattttttatgaaaatagtatacactatacattaacttggaatctaagaaaggaaaacataccttggtaataaactccattgagatggccagcgtgacacttgttcatccaccaaccagatccatcctgttcagcacagttgccttcaaacttatcattgtcattgtcccaggtactgaactgcatgccattatgggatgtgaaaaacttgtcactaggatcatcgccaaaatcaaagccatcaaaggcatctccagcatccccaccagcgaagtaggcatatgttaggcggtacttgtcagcttcaggtcccaccttgaacatggcatagtctgcagtactgagaagaaggaaatacaaccatcacatgctgaccctcctcagggatctcagaagttccctctttcgtaggatgcttccttggaatttttgactttgtttcttaaggctgaaatttgctcattgagtgaagttttttgcaaatctggcaagaggcaatagatatgtgaaccagtccacagctcattaacacttcccgggatgggcctagaagcctttgaagcatctctgaaaactaataattgcactcacttggatgcttttttgcttgtttcattctaagatcaaatccagatgtgtagatgactctaatttcatattttctacttttattgaaatgttatgtgttgcacacacattatcatagatcacagaaagtatctgacagtgagtgacccttaattattgcacaaaacttgaaggaggtacagttccattagccactcatagcacctgaagggttaggtgctaaagggattttcttcctcaaatcagtgtggtagtggcaagaaggagagcttctgagggcattacacaatcaaagtcttccctgtgtggtccaaagcatgtgagctgaaggagttagagagattctttcctggaaaaaattgtgcaagtggacaacacttctatagagtgggggaaaggatgggccttaatgaatgaacagaaatttccagaaaatatttagcttattttctaatctccagtggctgggaaatggaaggtcctttcctagaagaaggtctactgactatagcactttctggattaaaaaccaaccaagcaataaaaaaaagtccatgtgtttgaagacaatatatttcactattccttatacataacaagagggttggatatttttctgcattttaattaggtaacaatgcttaaaaccttcaaatatctcaagcaaaaagaagcctctagatcatcaaaagagctagctggtttacttttagggtagctcatgatttgacagaataaatggccatcaaggcactgagaagtctgaagaggctgtatttgcttttcaaccaggatagttgttaagaggacaggctctaaagttaaactacttgagtctgaattctacctctaccacttatcagcaatgtgactttgagcaagttaatctataaaatgggattaataataatacctgcttcatgaaatagtaatttagactagataaaattataattttatgctcaattcctgggactgattaaaagttcagtaattagctattactctgaatggttccagggtaattagattgtaccaatacacttagattcatcctgaatagaatttacctttttggattgcccaagaaccaaacagactcctggagaaaatggtggctggatgtgctgtttgcatttgtcaggctgcatttgccattgtctattgatagttggaaagtgcacattccaggcaatctttacaataaaaagttggaagtcatttcaaaacagtacctggttctgccattccagtcttccagttccactcttaatgcatatgggatggcagactgtgtgcttatcaaatgaatcttctcatttcccagccaaaattctgttgtgccagtaggagacagatgtccaaatccttctttatattgaatccagtttttcttgaaatctacactgccatcaagtctctaattacacatttgcaagagcaaaaggagaaaatagactatcaatgcatgtaaagagaatgctgtcaacattttgtcaaaaatacagagcactggttctatcaactcccaactaagtgatcttggccaagctacctcagtttcctcatgtatcaaataggaaaaatgatggttacttcttagggttgctgcaaggatcatgagagagaatataagagaaatacttaagagggtttctggcacatcataaattctaaatgagtggtaatattaaaaagacacctagacgacttcagaactctagctggatattactgattcttacacttatgatggaacccattgctcaatcggtgtctggcaactaatgcttccaccattcattccctctgagcgccccctgtagaaacagttataacagtggtgggaggtaaacagaaagtaaaggagccaagattcctagtgggtatcagcaagtggcagatgcaacacaggttccttgtcttggagcagcccaagtgtatcctctggtgtgtgaaagggtggtgatggtggtggggtggtggggggtggtgttgggcttcctcatcttgtgatgggaaacctcaggtcttgacctacctgacaaaagagtttccttctttttatttgtcactgtggtactatgattatgtgccaccatgaatctacaaagtcagtgccagtacaatatagagtcaagtcacaaactctgaaactatactgcctaggttcaaatgctgactctgttgcttattagttatgtggtcttgggcaagttatttaaccttgtgtgcctcagtttccttttctgtaaataggagtaacagaagtaccttcctcttagggctattgcaaggattaaatgagctacggttcacaaggtgcttagaaaagtatctgccatatggcagaaacaatgtaggaatttattaaatacacatggtggggaaaaaattaccttctgaaacacagtccatccatttccagacccatcgatttcacagtagactaagaattgctggttagctttcagaggtttaataaagtaaagcccgctctgtttagctcccttattggcaatgtcttgacaatctagagaaggagaatcgacttttactgtggtttgaaatgcaggtaagactgtgccagccttgaaaaatagcttttaacatgtagtaaactattcattttccaagaataattttcttacttttcacatcagcattccttttaaactgttttttttagctattcaagaaaggtctagacaactgaaattcttagacttaatgggtagccactttctaaactattcctatactttccagtacatactttctcctttacattacttactttgatgaacctaatcccaatataaccttcatcagttacctttcccagtgatatcatggatttgcaccgtgtctttgcaaggttcctggcactgtgcttcaagctgggctaccttctctttcaggttaacaatcttttgattatttgaattatatatttcctgcaaatatctacaaacagaaacataagataacaaaaataagaagacaaaaataagtattcctttcagaagagtaattttatattttctttggaaactgctaagtattttcttaagaagtgctttctgataaattattccattcttgaggaaaatgtaaaattatattactaaattaacatgaattaaaattataaactttttgaaaaagaaaaacaaatcaaaaaatcaattaaaacaggaatacaatgtggacctgaatctttttacttagaatggggcatattgtctcaactcccaacacaaataacaaagtccttgtcaataagcaaatgtcattgacattttgctttttactttatgcataagggacagcagatagcaacctgcaagagtggcgggactggttaataggaacaccccctgatgctttagaagcaggaaaagctcagttcagtaattcacatgtgctgaaggagtatacctttcacttgtggatctactgaggctatacatataagcttcaatctaaaatataacttacacagggacatgatctggaacgttattgtatgtaaaataaaacaacagatacttcccctttcttctttaatgcttctggttacatagctttgggaatggactgggggaagtaaaaaccctccttttgtagttacttacagggtggcttgcaaatatccaaaaatgatagaaaactgtctacaatgcataaaccgttctttctttgaagtaaaaaagggtagacaaactatttgtccacgttttccctctaccttgtcttaggcaatttctgtacaataacctccttcaacttcaatgatggacaataataatgcaagtaataataataacaataataacaagggccctctgatagcaaaaagaggagaaatctttcctgggccacttctccctagctactatttatctcaatttctcaagctgctttgagaaaaattcagaaaaaaaaattggggaaaaatattaaaactgtatctgagaccttatgttcagaaagtttatgagtccctgagaagctttaacagagacattcacttccaaatgaagggaagagactatgcaggttcattctgcaatgatcaatatgagctttgcaatatttgccacacttagtctctcaagacatgtttcttcctgctccacattcaatataatttactttaggagccaaaatccttactatgcctctgcttgctaatttttttaaccaccaatttgtcagcatttttataaagaggattttattttcaacacccaaattcctatgagattgattttatgttgtaagataaatgggggatggggaaaaaatttttgataaatatggtcaaactagcatttgaagacatctagaacatctttcttcaatgtgattattaataagcaattataacccagtataatttatattgcactaaaaacttctatctctactatgctcaacataatcaggcataatgtcactgggatattataaatggggaaaacacattaaaaattactttcactcaagtatagaatattaaataaaaactaaatcagtcttgcagagcaaattaaaacaaaaatccttaccgaatacttgagtcatgtgttaaaatcgatgcttcatatttcataatttcttctaacattttcctggacttcaaagtagcagcgtctatcatatctgtaatataggatcagagacataaaaatccttaagcaaatagaacaactaaaacaacagcaaaagaacttcacagattattattattattttttggtcagtagtctttattttctcacttggttttgatgattcatcaggattataagtgagttggattgcttttatcagctgtttgacttctgatgttttgttttcaacttgatgtaagatgtcttccaaagactgtagatccttgtctactttggtttgataagtagacaggaaatctgcaatgccacaggtagttggacaataactaccctgaaaatataacagtgattaaaaatgtagacagatgctactcttaaaatctattaagaaaaataggtaaaacctagactatgtttttaaaaagttacaagtgccagatgatatttatgagggaattatttctattcctctgcccctctccagttcacacacaaagggagaaacataaaaactacttacgaatctttcatctaagatgcagcagttgtctctggtagcaacatactaaaagagaaaaaatacagaaatttcactagtttattatctgttttattttccagctttccattttaaacaacgttttgtgaagagcacacttactgctacacatgttgaagagagaaataaaagagcatagaagtagagaattaaattccgggggtgcaaggaccaactcatgatgtctgagtgcccggagctccgagccttgtagtgtcagcactgtcacctctcaggctccaattgtccctttatgtaagctcctgggatagccaggactgcaaatggctggagctgatcacggggcctccttaccagaagggtgggcaggtctttcccgttcctttttcctcatcctggcccccaacctatactgtcaggttcccagattttgcacacaggttgaagctcctcctttttggcccagctcaaggttttttctctgatccaaaattatctgcaaaggctagtgaagcattatccattgctgtgaggaggagggcagtcctggaggctgtgtgatgcaacttcttccagtacatggctgagagcaaacagatatgacctcgaactaagcaaacctagtctatccttaagatgggtcctgctgccatcacctgaattaccaaaagaactttcttagcttagggatcagttaacactattattttagcctagggatcagttaacattattatttttaatctgtggctgtggcaggaggagactgacttcccccatgtcccagttcactattcccaggaatgaatgaccctggaaatacattcctgtccctctgtgtcaaccatgttcataggctctcacttctcagggagcttttgagctcaatcttccctttgtctgaaggtgggcatggcaccccatctgccacagagaaaagagccaggagcccacttcattgttcctgtggttccatcaagctatctcagagaagagaaaaatccacctcccttgtatctaaggagagtagaggcatagctgaaggaaggggcaaaatgaggtgctggggaggggccatcatttctgtttggcccttacagcatccttgtgtttgggaaaacatgtctgtcatcactgcctattgagatttatcactgggcgttacactattattaatgtctctatttttggttatccctcatttcttcctctggaaccaagcttattataagttttgatgaaatatgttagtgggagaaatgcctccagtttgaaagaaatactaatactttaattctgtctttacaaaggtatatttattgactcaaaaacaaagataaatattcatattcagtaaataatcaataattataacaaagtgaacacatcaaaaccagatttgttgcttttcttctcctccttaatatatccctctctgacttagcagttattgtcaatcatatcaccataccaccagccaattaagtctcacaatctttctcatccatcttttccactcagctaatcagttgtcaatcaagtcagttgaattaaacatttaagtattagtattctttcaaacagctctacctcagatagcatttgtagcaaccttatattatatgtatacatgctgtatccactgcattagattgtaaactgatttctgtggctacggcatctaacatatatagctgtacttaacatagttgtagttaacactcaataactatgtaatgacttgaatcagttgcctctgtgaagaagaatgggatgcagaggtggaggacaggattggaaaaaaaggctttatttttctctgtaaactttctatatttagaatgttgaatgtatataaatattatctactaaaatatatataatgaaaatatgtaattattgatcattcacaaagatttacatagtacactgataattacatcttgctaactttttaatatgatttgaacatgaaaggtgactcaggcattgcctttgccttcaagaagtgtgtagctcaattggagaatgtataaataaatagttgttaaggctctggagtccatctccctaggtttgagtcccatctttacaatttactggctgtgtgattcagtacaagttactcaatctccttgagttccattatccatgtcagtaaaagagagataatacttatgatatggtatttacttaatagggctattactaagatttagtgggataatgtgttgagcacattacccaattcatggtaagtgttaagtaaatgtttgtaaggtttatgaattaccaaatatatttggtataaaatctatgtaaataggaaactcttttaatagagctattattggtagatttggttcacagggaacaagctttgttgttctagctacagaaattctctttaataaaaaatctgttgcaactaactgcagtctccttctgtaagattccccagagaagaaagcacctggtcgtttagtttaggaaattctatccaaattgattttaccaatcaaagatcaaatgataatataaatggattgcatgccttgtgagaaggtatacttcctatctgtaagaatgttcaagcaaagtgtgtttagacagagcatgtctttgtggttctttttgctgaagaccataaaatattagtttgttgaatttagggtaacaattcatgcagccacaggttgggttctgagctccttaatgtcataaagtttcattggttgtgttaagatatataatattcacaaagttgataaacatttaaattgaggacattagaaattctatcttatcccattttagaagtggaatacttgtattacaggcttttaactgacttatattggaatccagatgtgttatcacaattttagagaaaataatttccttttactacaatctcaagtcctaaatccaaatcatataagacaagatgcttgctctctgagaaaaaaaaatggtcaacagtgatttagcggtctacattggccctgcattcaatctagtatcacttaggtttattaaattttaactagttttttcatgtttgggccaattttttctttgaaaaatgataaatgattgatgaattccaggaatgaagaatgtttcttaaatcacagttcttctacttccaggtatgttttttgagataatagcataggtagtatttaagccaaaataatcatttactgtaactctgaggtcagtgggcttgtttattgaaataataatgtcccaaattccctatcgtccaaccgtttgtgttctgatttgaaaacacaaatctacagctaacagtcttcgtgtatattggtaatttactctgtgagccaagtctgttacattcatctttgctccaaaattatttgctgaatttaaatttgattatgtagaagacttcttgacctagtgacaaatgatatagccctaaggaataatagaaagaactaccaattttgagcatcttctttatgctagatattatgtggtagtatagtttttgttgtcatgtatattctctcatttaatcctcaccacaagcctaggaagtagatataattacctgtatcttataatgaaaaaagaaaggcctagagatgttgtgtaacatatgcagggtcagtgtgccagaacaggaactcaaacccatggggcccaatgcctgtgctcttaaccatgaatcttaatacaaccatgaagcccttcttaatttaaaataatacacagatacaaggtgttatgagactcaaagttattcactgatagaatggattttaaagatgtgtgtgtgcatctacataactgtgtgcatgattatttgaacacacatttacatctatctaccaacttatctatcttcttctctgggttagagacaagattttgtgaatgatcttttacagtctttgagtatttctcaaacctagatttgtgttgttttatgattagcttgtgtttatggtccttttttttttttctctctctttagagatgcagcctagctttgttgctcagtctggcctcaaactgaactgctgggcccaagtgatcctcttgcctcagcctcctgagtagctcggactatgggcacgtgccaatgcacctggcttcagtccaattttagatggaagcagtttttcaatgctaactgcatggttcaagtttaataggacttgataaattgaattccatcagtaagttaaagggagagacagccactgcgtggtcaaggaagctcaaatcaatggcgacaatgatatatctgtttttctaacaagtaaaccatttctagatctaagctaaatttatagcctgaaccctcagaactggatttcctaaaaactggcagaaagaaaatgacctattggcatactgaaagccagtccaacctaatagtaaaaatatcccattaagggcaacagagttgtctgttagaatatttgctttgtgtataaaaatagcccagggaaagtgaaaacgcaaaagtttcttggtagtctgtgaacaatgtgcttttagtttcactatgtaaatcaaagacaaaaacaacattgggcacaagtaaaatggactccctcactggcagcagaacagcacccacaggttgagttttgcacttcttaacttcataaagtttcattacatgtgtcatttgggggatctgtcctagcggcagggatgttgaaaaatctctgctgtgattggaatttaggaaataaagtactgggtgcctagagaaagaaggattatcccattggcaattacagaggccaaagaggctggaaattagccatttttaatactagtttgagactaaggaatgatctgaggtgccctggattgagacaaattgaacagagaagttggatttaagtgttttgctgtgccacattggtatctgctactggtttgtttgtgtttttccatctttgtgtaatctacgattttaaatctctcaccccatgaaagaattttcatgactaaatatgattagcaggagatttacaagagcaaatgagtttggggggaaaaataaaccaccaccaaccaaggggccaagttatattcacaagaatgtgctccggaaagaagaaactttttaagcctttgagtagaaatactggcctatgttgaaagtggacaggcccctgtttgagaaaaactgtagttattttgtcatataaactatctttggaggaatatatatatatttctaaagaaggagagaaaataagaagaacagagaatgctatcagatcatcaaagcaattcagtcatcttatctagcttaacgcacacatttgctttaacctgcaattttgaatgaggacaaacaaaacatttataagatttagatctttgttttaaattctaactacttgggttagtttattgtcttagtgtaattgcactatagtcctttcaaagttaaatccatataggatttgctgtgtacaaaggctaactttctattgacattttgaaggactttgcttcatccatgaaaggtgacatatctctgtcttcttcaagtgtagatttctgtgtatactttaccttgagtggtggagcagtgacctctactaagtaaacaaagatacgatttgcaaaaccagattaagtcaaagacccaaatatttattgaatgttgtgcaagaaagcctagagtgtaaatcacactcttgatggataacactatggctgcaagttaccgaagaatggtctggcttcagggctgaccagagcaagctcattcacaaagaaacaaggttaggtcaaaatttagaacactgcattttaccttttataaacagcagagaggaaattctgttgaccaagatccaggaaaccgattgcttaattatgcatccttctgcgtcggaaaactacctgatatttacatatcaatacttcctgtggatctcactatgctttataaggttaatttcctcattagtactttattgatatttaatactacatcatctaattatggctatggaaggccccatacccctcctcatattaacctgatatgttaagccatttctagctctgaccgagaaactttatagaatttatctaggataatatctaaaataatgctgaatcaaatatgcaccacaaaatttggctgccgggtaactgcacactgtcccatggtgttcctctgctggatgctcagatcaaagtggtcattcacttagtaaatacatattgggcatatactatttgccaggccctgttctacacaatgaaccaaagtcgctgctgataagtttacattctagtggagagaaagaggatataaacaaaatattatataatgtcagttggtgacacgggctgtgaacaaaaatgaagaaggattaaggaaatgaaagactagaggaggtgctgttttagatatggtggtcgggcagcactctaggttaaggtgacatttgctgggtttctggtgaggctagttacaaagctcatggctggctcactattgccacctgcaggccccaatacatctggaggatgaatgatttaaagccaacagacacatattttttcatttagagctgtcagagatttgacaagtgtaggtaagtaatagaatgagaagtatactaagagaggaacactgcgcaagttagccagaaaataccacaatgaccatctacacattactattgagcttgcgagttatgccattctcttcatcaaaatcctctgaggaattcccatttcctgtctaattaaatataaacttctcagccttgtatttaagcttctccaaaaaaaaaaggccaatataacttgttaggtatatcttataaattggattgaggtagcatatcccataaaatttcaaaattttgccttcatgaggctgacataaaaggtattttaattattatacaattattattatataataccttaattaaataccttcataatcatataataataccttaattaaagtaaattttatgtaagcctcatgaaggcaaggatttttaatctgttattatctgtggtgcttgatcaatgcacccaataaatatttgttgagtgaataaaatatattttactaaaatattaagaattactaaatattactaaaacactaacataaaatactaaaatgcagtttgaggcagagaacatgaccattaagcagataacaaaatcattcaagaaaaggaaatacacccatttcaaaaccatctgtttcagagcaaaaatctgtagcaaggcaatcagatctcacagtgtgggtcagtgatagagctgatggagagtactggggagggaccacggtgatcctcctgactccatttgagtggatcaggagaggagcaagacattcaccgtgattttttgactgaaggaaactttatatgtatttaatttttggaaaactaaagcaaaattgtgtcacattttaaaacaactccaagtttgaatgataaacataaaatagagtgggcaagtcctagaatatcacaacactaggaggaattgcctagagccattggtcactgtttctcctgatttgctttataaactataaggagagaaagctccacataggcctctgaaccactcctgcttgactggaacaggtgggctgccctaaccaaacagtacaactttaacaaaggtcagtcaaatcctagaagatagggaaatgagggagtttatagcattgtgttgtgcatattctctagaatacgcagaactagggctagaatgtgtcatagagaaagccaagtaaccttcacctggccctttccttaggtttgtctgtcttggtcccatgctttagctcagctcactcagctgtgctccaagtcagcaagtggtcatgacctacatttgggacactattgcaggaccttgtgtcacccactgcactccatttctcaactagaatttgccactgggcctcaggctgccacagcctatggttactgtcaggaaatgcaccagtgcattccagcctggccccagcacccagccctacttaggtttgttgtggtcccttctttctccattcaggaatccctctctacttcctgctctcccaatgacaggatctggtaaactcatatgaagtaaggtaggaaagactgagctcgcctaaggtattacttctaccaagactgaaatttaaacttgagaaaaacccggaaactgaagacatcagaatctaaaaagagaattttacaaaacagtcagctattagaagagaattatgggatcaaatacaaattaggtaactaagagaagttgtataaagccatttaatgacgtaaagacgttttatttctattttaagtacttagaatttcttctaagcgactatttcttaaaatgctccttagattactctgtttcactttgttaaaaatgttaggttcctcagcccctttccagatctaccgaagaagagtatctgggagtggaccccaagaatcttcattttattaacaaacttccccagatgattattatacacagtaaaataggacaaccactgccctacacaggagagtaaccatacctgctttacctaagaaggccttatttccattagacaatctcaaatcttgtatacttcctctttgttagagtatttaatactgaagatatgccataatcatttcttgttgcaaaaagaatttaaaaaccaacggtatcagtttttttctattgaagtttaaaattagattttggtaattcagaaacaaaaagacaaatacagcatgttctcagttataagtgggagctaaaaatctgcacacatgcacatacagagtggattaatagacactggagactccaaagggtgggagggtcggagaggggtcagggatgagaaattacctattgagtacatgtacatcattccgatgatggttacactaaaagcccagacttcaccactaaaccatatatctgtgtaacaaaactgcactggtaacccctaaatctatgaaaataaaaaacaaaacaaaaacaaaatagattgtggataatccagtttaatgatgcatattgctttattgatgaatatggcatcaatgctgcccaaagaataaaaagtagactggccccaagccccagtgccttaacacattacagaagtaggtgttcaagaaattcaatcgctttacagaaatagaatagaaaggacttagggaaagactgaatgaacacgtaggagaggggtaaaagtttcacagataataactctgagaaacagtaaatatgggagaacactaacatgaataggaaaacaagaagaggaactggtctgctgaagagagaaaatgaagagtccaatttccaacattttaagtttggatgggagtgagacctgtaagaggagatggcgtcagaatgctggagatgatagagctttgggaatgagaactagtggtgagctgatggagggtgaagtgagtttccaaggagaaaacaacctgaggacagaatgtggactgaatttaagagctggcagaacaggcagagaggggaagaatggctctgactctacctcatggccctgtgcctacacaaaagccaaagactttcatatctccaaatgacaccgcttggatgtgatttagctgtttatctgtgtcttggaatgctttcaaatgaaagaattataaacagtattttatatatatatacacagatatatgtatacacattatatatacatatacatacatatgaaacctttgctgttagatatgtcagataatacagaatgagtggtaatcatttaacacatttcatgttctgtggtgccagaaatgggtaggctgtctagtaaatagattttgttaattagtacattctgtgatataatctagttgtgctgaatttcctgagatgcttggaggaaactgttggatttcattgtgaatggatttttatgttgcatatgtcattacagattttgatgaatacatagggtttattagggctaattcaaaccaaaattcaaataatttagaaatatagtactctattctagctgggtgctgtggctcacgcctgtaatcccagtattttgggaggctgacgtgggaggattgcttaaacccaggagttcaagaccagcatgggcaacaaaacgagactacaaaaagtaacaaaattagatgggcgtggcagtgtgtgcttgtggtcccagctacacaggaggctgagacaggaggattccttgagcccaataggtccaggctgcagtgaactgtgtttgaatcactgcattgcttttcagagcctgggtgatagagtgaaaccctgtctcaactttgtctcaaaaaaa

SEQ ID NO: 351 - DNA, 25870 bp, Homo sapiens
gaggctgaggcaggagaatagcatgaacctgggaggcggagcttgcagtgagccgagattgcgccactgcactccagcctgggtgacagagcgagactccatctaaaaaaaaaaaaaaagaaagaaaactgaggcctggaggctacaggccttgcctagactgcttgtgtaccagcccaagactgaggcaccagttacaagaggcgtttttactggactcggactatttagctgccatttactcaacatggactgtgtgccccgtactggtctgggcattttgcctagaatctctcatctgattctccattattacctgcacttgcaggtgaggcctaggtcatgcagctataaatggaggaatgtgaattcatgcccaggtctcgagggaattcccatgacttggcttccatgatcctggccctgctggatggagccagcctcatggagggcgctcggcccaggctcagtgaccaccccagcctcccactgtcccgaggaccagtctggctgatgtcagtgacgctccactgcccccatgtggccactccaggccccaacatcatcctttccggctccctcacacctccttttccacaccaggcctgtctgctgtttgtctcattgtccacccagcagcaagagtcagcaggaggctgaattgaagacagttacaggagcatcctgtcttcctcccagggctttaaaagtcagaagcagctaatggacagtctcggtggagggctgggctgttgggacctaagccccacagctgcaatcactgggttcggaggcagggcctgacacacctctctccccctctcccgcttcctcccaggatcgctggttctggcgtctgcgcaataaccgagtgcaggagggctaccccatgcagatcgagcagttctggaagggcctgcctgcccgcatcgacgcagcctatgaaagggccgatgggagatttgtcttcttcaaaggtaatgtagactgtgctgtgggacagttccctgcccaaggtcttgggacctcctttttcccatctaaactggaagaggcggggtgggaggcagatgtcctcagagggcccctctagtctaacggagacactgacctctgacaaatcaagtcagaaagtgagactgagaatctgtatgtgccgagattggtggggtgaccagcttcgtccacatgaagtagagtgtgggacaagcaattgaagaccacccagtacctcatgggaggccatcgggtcagttctgtaagaacccagagggaagaggtcactcaagctggggaggtcgggggagggtgtgggagggagctaaggtgcccaccctgtacccagcactgtgctaggttgtttcatgacagttatcttgactcgggccagacctcagatgggtgagatacagatagtgagaagcaaggaaggcattccagagggacaacggctgaataaaggagcagggctgggatgtgtacggacggccacagggcttagaaggcccacctgatggccacggaggccccgccttggaaagctgtgagaaatggcccagaaaggtcatttggaggcaaatcctgaagagccctggctgccaggccagaatgtggtcttgatccattaggccaaggctggaaattcatggaatgtttccgagcagcagagagccagagggcaggaggtgacagacatggcaggggcagggcagccatttctgaggtggttctggagcgcgccactcatgaggcccaaatgagggaggagccgtgcagctgaagggcaggggacagctgccaggagagtcagagggcctcagaagtggctgaatactcggccaggcgcagtggctcacgcccgaaatcccagcactttgggaggccaaggctggcagatcacctgaggtcaggagtttgagaccagcctgaccaacatggtgaaaccacgtctctactaaaattacaaaaactagccaagcatggtggcacgtgcctgtaatcctagctactcaggaggctgaggcaggagaatcgcttgaacccaggaagtggaggttgtggtgagctgagatcacaccattgcactccagcctgggcaacaagagccaaactccatcttaaaaaaaagaagtggctgaatactgagaggagaaggaaagagagggtcaacagtgaggctaggactccctgttggggacctgggaggcagaaggtgatgaggagggagcccctctgtggtgcagatgaggagctctggggagccagccaatgcagagctgccggtaggccgagggaggtcagggtttctggctctgctgctcaggtccagtgggagagcctcagagtcgggtgtcactggtagcaggtttggggagtggtagtgcatatgcaaagtcatgtaagtggctgagatcaccagagaggagagaggagcaagtcacatgaacaaaagagggtgggactcggagcccaggcagcagaggcaagttgtccaggatctgtgactggcctcaggcttcgtgcccttcccaactctaactgggccaaggggctgagggcatcagactgttttcacctgacaccctgaagatgggcaaacggcactgagtgactggggaagctgatcctgggctcctcttggccacaggtgacaagtattgggtgtttaaggaggtgacggtggagcctgggtacccccacagcctgggggagctgggcagctgtttgccccgtgaaggcattgacacagctctgcgctgggaacctgtgggcaagacctactttttcaaaggcgagcggtactggcgctacagcgaggagcggcgggccacggaccctggctaccctaagcccatcaccgtgtggaagggcatcccacaggctccccaaggagccttcatcagcaaggaaggatgtacgtaagggccgggccagggtgggcatggggagccggttttatgtggtcctcaccagtgcccacgggcatactcagtgcccatgggcgtccaggtttgaaaaaacacctggtggcagacaactgcctcatatctacccatgttcacgtggtccattaattcacttaccagctgccaagtcacactttttcatctgcaggaatgattcacggcagagagacgttgtcatagactgacttcattccttcagacagcatttctcaaacacttatcctcagtgtactccagggacgccttgagttacccaatctgaaaagcaatgatgggcatgcatgtttcaaagccactttttcacagggctcgagggcaagaagatggaaagaaaaccttcaaaaaaaatttttttttaaattctaagagataaggtctcactctgtcgcctaggctggaatgctgtggcatgatcatagctcactgcagcctcaacctcctagtctcaaatgatcctcctgcctcatcagcctcccgagtagttgggattataggcacatgccactgtgcctggctaatttacatttttttgtagcaacagggtttcactatgttggccaggctggtctcaaactcctggcctcaagcaatcctcccacctcagcctcccaaagccctgggattacaagtgtgagccactgcatcaagagagaaactttttatgtttcctgaactcctcctagaagccatgctggccaccagcccccacgactgccatcagacactcagcctgtctccccaccagcctaggagcttctcaggaggagctgctagcctggccagatgcagagtgggcctccaggagtgtttgttaaatagatctccattgatatggtcaaaaacacagactctagagctggactggctgggttcgtaaccaccatagtaccactcactatgaatctgagcaaatctttaataagttttctgttttctcatttataaaatgataataacagtacctacctttatataatggttttgtgaggattaaagaagacaaattatgtagcatacttagaaataatgcctagcacaccatccatgctgtatattttagctgctatcgtcatcatcattgtcatcatcatgggtttcagtttatgtggattgacaggattcattcactcactccataataatagacagcttgtgtggtgggagctggggacgtagcagtcaacaggacttgcagacgtccaagtctaggggcataaagcaagatggcaacagacgctataagggaaagactcccagcactttgggaggctgaggtgggaggatcacttgaggccaggagttcgagaccagcctgagtaacatagtgagattcatctctacaaaaaaaaaatacaaaaattagctgggcgtggtgacatgtgcctgtagtcccagctacttgggaggctgaggccagaggattgcttaagaccaggagtttgaggctgcagtgagttacaactgcaccactgtactccagcctaggcaatggagtgagaccttgtcttaaaaaaaaaaaaaaaggaaataaatgctgggagagagcaacgagctagagggggccgtgttagagatggctgggaaggagtctctgaggaggcttcactgctgagaaagccaatggccacagctgctatttgttggctgtcttgtatacctgatgctttacgcacaagatctccctttttggggagcctcagagacaggtgacatcaaggaccgagaccaatgaaagccctagccacggtgggaagccagccaatgaggacggcctaagcaagctgctttgcccactggctgggccgctcaggctgttgctcgagccctggggtggttgcccagggagtgattggcagggctgcccagcctctctcccagaaggctcccaaaggtcctgcatctgtgttgtgaagtgatgtgtgccaagccaaaaaaatccataattgcagagaggtcttgctgtcaacacaaggtgaaatcttgctccctgcctcccttggctcaagcaggagccaggctgaggcttaatggagcccacatgagcggggcaagggggacctgtgcgcacagtgtgacagagctgtgacccaggcttgcgtgcaaggggtcctgtctgggcagcacaaagtgaaccatgtcccagttctccctgaagcccctctggtttcctagcacccgtaggatgacaggcggaccactccaggtcccgggtgcccccctctgcagcttcttactccatgactcagccaagcactgcaccccaaacctccaggtgtgcccaccttgcctcccttgccacagtgcctgtgccctccttttcacactgccccagagcaggtgccggaagtgtctgggagtggtgatgctgggctgtatttctgcagattacacctatttctacaagggccgggactactggaagtttgacaaccagaaactgagcgtggagccaggctacccgcgcaacatcctgcgtgactggatgggctgcaaccagaaggaggtggagcggcggaaggagcggcggctgccccaggacgacgtggacatcatggtgaccatcaacgatgtgccgggctccgtgaacgccgtggccgtggtcatcccctgcatcctgtccctctgcatcctggtgctggtctacaccatcttccagttcaagaacaagacaggccctcagcctgtcacctactataagcggccagtccaggaatgggtgtgagcagcccagagccctctctatccacttggtctggccagccaggcccttcctcaccagggtctgaggggcagctctggccagtgctcaccagggccagcagggccctaggctggggtcgtacagctgaagtggtgggtgcattggcctaggctgagcgtggggcagggaattatgggggctgtgccccagggtgggtgtctggcacccagctgccagccttctgtcctgggcaaactactccctacttaagggaataggccaggctccatccggaggcagggaccatgccaggaggagcccctgtggtcacggcatcctgtggtgtccatgaggtaccacagctccactcctggctggaacccagcaccctctgtgggaagccagcactagctctcatcccccatccgggagataccaccagtcctggtccccttttgccaacacctgctggtcagatgtccccctacccccaccccactgtcctccaaggctacaggacccctgcttctgacacagtgagcaacaagcctgggtttccctgctggcagacggcagatccctcaggaaacctgctccacttgtcagggtctcttcggagacccaggatttagggtcacatgctgcaggcagggctgtggcccagctgggtctgacaaggacccagctgtcacatcgtgaatatttaaatgtcctgtcactactgtcccattttgcaaaggctgcttgaggctttaggtgaactagaggtgactgtcttggtgatgaggccagcatagcggccctcccccaggcgacaaggaccaaggtgctgctaaggccactctagcgcccagacaccccagtagctgagctctgctcctatggctacagagctggggcagaagctgaccccatttctggaggaagatccgagtttgtgaccgtcctccactcccctctattgtcactgtccccagctttgctccagtctgtcacttgcagcctggagctcagcctcaccagttaggtgaggcagagatggctgcagggccaacactggcagagcctgggagtccttcggaaggggaccagggcgtctgaagtgctcagtgcccccactactctgaggccgactccagctactctgaggccgactcaatctctcggctggaagcagtgttttcccagagcttggcccttgctgacctcgctcactgggcccatcttcccacactgctcttagaaggacacccctaccggtagcagccccaagctgagggggctccctttttgaccttcactggcccgcccttcactgtctccagcaggagttcctagggcttggcctgccttgctccacagtacggcggaggcagccctgcttgtcactgaggagccctagacaaggccaatgggttcatcaatgcccactggctctctgccaaagccaaaaaggtgtcaggcagtctccagcgtgctggccgggtctcggatgccacccctgctcactgagcctgcatgggccttgcccccgaccctgtggtctctgggattggggtcggcttaccctgtagcacagacagggactcctgctgccctgggagctgtctcaagcaaaatctcttgtcccagaggtgcccatgtgggtccgctgtgtcccctgtcatcatccttgttttttctcattttggccaagggcaggctccctgggacaggcagggaacaactgcggagatattagtgattcataggtttgtacagtgttttatactttgcaaagcactttattagctcacacctgtccactcacatgaaactcgtgttaggccctgggaggccgacggtaactctcaccgtgccctcagatgaagcacagagaggttgttacttgcccgggccatccagtgggctggctgggtcttgtgtccccatctgtggacccctctagggtctgagatgagatgagaagtgtctcctgtatccacctcttcctggcctcccttcccccacttcctggtccctgtccactcctcaggttggtgctctcacttcttgaaagctctaggcacccccgcctcccgccaggctccccattggctcctggcaggccagctgagaatgaacaggagatggaggcaggcagcccaggctgcagaggtgagggatgtggggccaggcccagagggctcagcctagaggcttccaatctcagattctcctgcctgtggtcatctgtttgtccatcaccccaggacagggcagacagaggggcaaagcactgggggccccagagcctagcttcccctcagcctgggggacatcacagcatttcagtgtcagtcacattttaaactgatcagcctttgtataatgttttttaaatcatttctaaataaaacagaaatacagagtgtgtcatttccctgggatgagggaacaaagatcaggttccaagagtaaccttaggacgctctgggaagagaaccgggtcctttggggtgtctgggagctgcccacccatctcctctgccagaccggcggtcagatagcctccctctacaacaggctggccctgggggcccagggttattggggttccaggaacacagcctgatgatgcctccttacgatccaggatggagagcagcccccccaggagtatggggagggtcactgtggcacgggcttctccatgacctgggacatgacctgggacacatagtcaagagcacggttatcagcaatacagatattaataaaaggcagacgaagtcaggaggtcagcaactttgcgggcttaccaggaggcctgtcctgcctctggaagccagcgacagagagggatgcccccgacccagccagccggagaaagggatggggtggtcacgaaggtctgagctgggtctgggtgtaggctgggaagcaggctggggtgtagactgcgaaggcggccctgccgggacttctttccagtccccggcgacctcttcgaattctctgctatctctggggagcctcgggtgggagggggtgtaagagacgcagggacgtggggagaggagacaaggcaggcaagaaccacaggggacggcggacagacgggcgacatcctgcggaggacgccgtcagtaccaggaagtgcaggcgatgaggaagcgcacgtcgtccagcggcccccacgggctgggctcgggctggggctggggctggggctggggctggggctggggcggatgccggggctgttccgggccctccggcgccgcaggctggggctggggctggggctgggtttgcgcaggctccggggcgccgcggccgccgcttagctgagcccccatggtctgcaagaagagaagccctttaaggtctgggtcgccgggacaccccgctagggccccgccccggctctgccctcacctctcgcagccagacccgcgggtctcccggaacccacctcggcgtcgggaggagctggcgccgtgacgccaccaccgcgtaccgacctcaccctccgtgcgttggagcggaaagaagggactcgaccctgtgcttcggggcggggctccgcgaccgtcccccgccaatcccgccccagcgcctcaaggccccgccccgcgcaaggggacggaatgcaccccaacagcctccaagacgcccaggccaggaggacgctgggaacccgctgccccgccccacgcccacccaggaaaagacctgcaacctccatccaccttagtcaaagaatgccccgaagccagatgccccagagctctcacaggggacttgcccagctcaggggaaaatcggaacggactctctgcctttcaaggccagagaagaccggcgcagaagtcgggtgaaaactgtgagaactagaccgggcgccgtggctcacgcctgtaatcccaacactttgggaggccgaggcggtgggtcgcttgagttcaggagtataaaccagcctgggcaacacagtgacttcgtttctacaaaaaaataaacgaggcgagaggatcgcttgagcccaacaggtcaaggctacagtgagccatccttgcgtcacaacactccagcctgggtgacagagggagacactgcctcaaaaagaaaaaagaaaaaaggagaactgtagtggagagtgtttcttgccccaggatgaagcctcacatcctgatggtagaggagaagggaatggcgtgtgtggaggtggtgaactgggttgggtgtgtgttgtgttcatcccaccctatcttcccagaatgctggaacaactggagagtgcagggattgtacacaggctgagggccccaaacatcacattcagaatggcccggagggaactgcactttaatggggtggcacaggacagcagaaccctcagccagcagccacagggcctgccagccagcacaacagagcaggtttttgcagtaatgatagatccaggcgataagcacaggtggaaaagggttgggtgcccagcccctcagtcccagtgagctctctgccacctccctgccagcatccggtacagattgggcggaatgtggagaaggttggccacagtccagagccaggagcccatggaacaacttggaaggtgactcaggtgaggctgaagagaaaggaaagcgcacggtcagtagctgtttcacagagcccacctcactctcaagtgaggtgcctgcctcagccctcatcccgggaccagctctgacaagctgctcaagcagctactgctctagtatcctagccctgaaaaaccacaaagatgaggattagcagatgctcaagaaatattttttgaatatgctggctcttatctgctcagcagtgtacagatatgctctcacactcgagaagctaccagaacaaactggtaggctcccattctagatgacatcttttccccatactctcaaaatgcaagttaacccccaaccctgagcagaagaaaggagaggccccaggtacctgtcaatgagggaatcccgcatgctggtggcaatggtgctaggctgggcttcattcagcttgaagacactctccaccactgacagctctgtgctggttgtgtccaggccacagaaggcacaccagtcattcaccaccatcccagcagcaatcacctcactgcctcggttcacagtccccgcctgccaagggatgggctcaatgtgagtcacggcaccaaattctctccctcctcaatgaagactctccccaaaccctgctcctccctgacctgcagccccagtcccaaactgtggcaggtaatgacccagactcccaaacactaggcaaaaggatctgcctcgggagacggggttcagaggacaggaatgcttaccacaagggggacttgaagaagagaggacagctcatcctggtcttcaattgaagtcttgggatgcaccagccctccctgattgctgaagacacagtagcttcctactagcacctggtcggccactgtctgtctgaagacttccaccttgagcacatctgccagaatttcttctgtctcctgtcaatcaaagatattgtgttcagggctcagaacttacagccccagaaccaaggttctccatgcccagaagcatccaggccttggctccctgagcccctcatttctcctctgtacctcatatgaaagcctcacccagagaaaggaggaagtacagcttagagcagagtcaagggcagctgtgaagcccctaatattcatgcatgccctgaacagctggaggctggtctcaatatcacttctttcccctctcacccacagtcaaaagttcaacagtcaatcacctatcctggcccaggatgcaggactggatggttcaatctccccaatcatgaaggattcataccctccccagcttctttctgacacttgataaggcctctgttatcactattccaatgagtacctgaaactcaagagcccatatagaaaaaccacaggagagacccctaattgctgcctgttgggaaagaacagtggctaaccactgactaggatggccctgtgactcttgggtcaagttgggctgcctcaccctgtccaagtctgggtggaccaaggccacgtagtcattgcaggtggtgacattgcccaaggctgagagccgctcctccacccgcctaatctgcactgtgtctgggaggctgttgcgaatgtgttgcagctcctggtcggtggtattgttgggtaccaggagaccgtgcctgttccctggagaaacccaaattagagggtgaatacacaagatgcctgctgagccctaggggctgaggataccactcagcccagcccaatcagctttcccaggaaagctttaggcccagagcccagccctccaacccactgatctggaaaacacccagggcaggccagagaccacccaggaatcccaataaatcctgcctacttcaccatcaccaactgggagggaagctgagctcttggcattagctgtatattttgctacttaaaaactgagctgccgggcgtgttggctcacgcctgtaatcccagcactttgggaggctgaggtgggcagatcacaaggtcaggagatcgagatcgagatcatcctggctaacacggtgaaaccccgtctctactaaaaatacaaaaaattagccaggcgtggtggcgggcgcctgtagtcccagctactcgggaggctgaggcaggagaatggcgtgaacccgggaggcggagcttgcagtgagccgagatcgcgccactgcactccaacctgggtgacagagcgaaactccgtctccaaaaaaaaaaaacaaaaaaacaaaaaaaactgagctaacactacacacatagcagaatggctagattattattttttaaggcagagtctcactctgtcacccaggctggagcgcagtggtgcgatctcagctcactgcaacttctgcatcctgggttcaggtgattctcctgcttcggcctcctgagtagctggaattacaagtgcgtgccaccacacctggctaactttttgtgattttgtagagatggggtctcactatgttggccaggctggtctcgaactcctaacctcaggtgatccgcccacctcgacctcccaaagtgctacgattacaggtgtgagccactgcccccagccagaatgactaaaatttttacaagtcatcaattccaagtgttggcaaagatatatggagcaactgaactctcatactgagacaggagtgtaagttggtcaatcactttagataattatctggcatcatctgcaactactactaaatagtcacataacctgtgactctgccatgccactcttaggtatcatatacccagtagaaatatgtacatgtgttcactaaaaaaacatagcagcactattacttttttttttttttttgagacggagtcttgttctgttgcccaggctggagtgcagtggcacaatctcggctcactgcaagttctacctccccggttcacaccattctcctgcctcaacctcccaagtagctgggactacaggcacccgccaccacacctggctaatttttttgtatttttagtagacacggggtttcaccgtgttaaccaggatggtctcgatctcccgacctcgtgatccgcccgcctcggcctcccagagtgctgggattacaggcgtgagccaccatgcccggccagcagcactattcctaacagaccaaagtgaaaactgcccaaatgcactgtcgatggaatggatgaatacgttgtgatatacttacacaaaacacaccatacagcaacaagaatgaacaatctacaaatacacgccaatcaatttctgaattccaggtcactcccatcataaaatacacaaggactaagctaaaatctcccttgttgtcagaacttgcttcaagtcctaagggcatggttagagatcagagtattttaactgaataggaaaatactttgaggtcactaggcttaagtttttgttgttgttgttttttgttttttgtttttttttgagacacagtttcactcttattgcccaggctgaaatgcaatggcacaatctcagctcaccgcagggtgagctccacctccagggttcaagcaattctcccgcctcagcctcccaagtagctgggattataggtatgcgccaccacacccggctaatttctgtatttttagtagagacggggtttctccatgttggtcaggttagtctcgaactgctgacctcaggtgatccacctgcctcgacctcccaagcaggcttaagatttttaaaaattaaagtaaaagtaaaaaaataaaataaacagacttctaaaagtgacctcaatgagcagaactaagaaacaatgggcagcagtaatggaagacagatccagcttaatgaaaggaccggccgggcgcagtggctcacgcctgtaatcccagcactttgggaggccgaggtgggaggatcacctgaggtcaggagttcaagaccagcctggccaacatggtgaaactccatctctactaaaaatacaaaaaaattagccgggtgtggcgggatgcgcctgtaatcccagctacttgggaggctgaggcaggagaatcacttgaagagagtgttgcagtgagccaagatcgtgccattgcactccagcctgggcaacaagagcgaaaactccatctcaaaaaaaaataataataataataaaaaggaaaggaccaacgaccagaattaacagtgctgacaggtaggaaggtagggtagagatgtggtaaagggaatttaagattccaacgtaactgagcaggaagaccgcatatcttagctaatctttacagagacagaaatggatgcttagaaagagaaagcaccttgcccagtcagtggcagggagagatgagatacaaatcctcggctgggtatagtggctctcgcctataatcccaacactttaagagaccaaggtaagaagatcacttgagcccaggagatcaaggccaggctgggcaacacagggaggccgcgtctctaccaaaaatgtaaaaattagccaggtgtggtggcacgtgcctgtggccctagctacctggtaggctgaggtgggaggatcacttgagcctaagaagttgaggatgcagacagctgtgatcttgccactgcactccagcctgggcgaaagagcaaaaatctggcctcaaaaaaaaaaaaaaaagagaaaaatccttctccaacactaggaactaggtgtggaacttactgagtcacttaggtcaagtctcaacttcctcatcagtcaagttaggccagtaactcctaccttctagtgtctttgtgacgaaggaatgagaacaggagtgaaagcactttacattatttgttattactattatccagcagcctttgctagagggttgccccgatctcctgacgcttggcctgagagattctatagtgcccagagataacagatgataccctgggaatccctaggtcactccgggttccctccgggggtgtaattaatggtgcttggagaccactccctccctcggcgtcctccacctgccttacccacacacatgcgcccgatgatgcggcagccggcgatagacgcgtgcaccacggggatggtatcggagagctcgccctcgaacacactgtagggacatggactcggtggtggcggggcagaggggccggcaccctcccactgccggagctcttgactcctgcgcacgcctccccgccaccgtaagccccggggctcccgccgcacctgtagaagttctctgagcctccgatcgctaccagacagtaggtgttggtgagcttggcaaagcagccgatctcacagttgttctcgaacgaagctcggaccgccatgaggcctaggggcggcggaggcgggagttcaaggccggcggatcctttcccaagtatcccggcctccgtccctcaggccccgccgcgaccccgcccctctcggcctcccggcccctccgtcctcgggtcccgcccactgggcccccaccagaacctccggccctgaatcctctggcccccacccctcccgacccaggaccggagctgaccctcccaggttcccctcacaccagcttaccaagtaaccagtaacaagctccgcacgcggcgactgtaccttggactccctaaaaaggtttccgtttccacttccgtccagggagacttccgggagagcccggcgctccccgccacgcatccagcccctctacctccggcctccggcggactctatggtcgcgagcggtctgggcgcgaccccgcctggccccacgcctagcctgctcgcgttcattcattcattattcattcaggagctttttaggagctgtcatcgacctagacctccggctggtcggttgtgaggcatgagggagaggaggggccaggagtgtctcgcggaagggttgatgatggaggtattgatggaaatgaagccggaggaagggcaggtttggggaaagggatgagtccagctgtgccttgagggacagaagtccatgtctggagcccagcaggggagtggagtgctgacgaatgagatgaggggctgaagacgggtggactagaagaggctacccatggagagagttccaggaggcagaagtgcggccagaccgaggctggagaaagagcgcagccagagacggaaaggcagccaggctgcaggtgctggagagaggggaggactgaggaagcaggggctcaggaaaaggctggaaaggggtccagggtgggcaaggatgtgggtgctggttggcttccacgatgtgcctctcgcacggcctctatcactcactcagcagccaacttctgtccccaggatagtgatgggggccaagggccctgctgcacacttggacaggatgaacttggcccacattttgtagaatctgcaaaagccccgggttctctcaaaatgtcacagtggtaacttggagcccctggactcccccaattcctccttcggcattcaccctcctccaggggtttccccataattggcctgaatggtgcccttcccattcccccaacgtgtccctcccataactcctcaaagttcaggatacaccaggcgctgtgattcacaataaagtctgcctttattgatgtgtatcatgtttactatcccgggtaagtggtgagttcaggaaaatggcccacaacctgtcacagcctgtacttcaagagacactcagcaagatgatgacgacgacaatgatgatgatgatgatgatgactcagcaagatgatgacgacgacaatgatgatgatgataatgatgatgtgtgtgtgtgtgtgtttccgggtatccacatactctgctcttcctcactcattcacctcagacccactcagtcctctttagggcatctctttcacctgattctctctaccaaaaatttttctaactctctcctccctctgtccaaaacctccccatccttcagggcctggctcaaaggccacctccatctcctctaagaaagttttctgactactccaccttctccaggactctctgccctttgttttctaacaccctctgtaactggttaacctttaacttgatatggctctgaccccttctccagcagcttgtgcatttcacctctgtccccaggtctgagtgtgacccacctgtcagctctacaggcccagcacagggctggaaacacagcctagattcaagaagatactagttagggtgtgtgtgtgtgtgtgtgtgtgtgtgtgtgtacacaagaatcttgagcccagagagtgtgtctgacctgggtttctagacacctcccttccccagtctgggacctgagcaagtccagagtctcggtggacagaggaggggcctgcccttgccagtgcacccccgatgccagtcctttggctaggactcaaagcggcttcggagctgcttgaacttggacttgttgtacttagtgatgaggtccagtttgctgtgacccagggtcagccgtttctcatccctgaccaggtcactgttaccaccattgagatggccacccttgggacccccaggctcagttccctgcctggccccgtgcaactgatgatacttggtgatgaggtccagcttgctgtggcccagggttagccgtttctcatccccagacccagctccagccgtgcgagcagggcttgatatcgggagaccattgggcccaggcccctcaccacggaatgggccgaactttgtgatgaggtccagctggctgtgccccagggtctgccgccgctcatctggtgcccgtctggcaggtctggctgaggagttggtttcaaggggcactctggaaccctgggccttggggtactgcatcaggaggtctgattggccacggctttggtttagggacagcctcctgtcctccagggcccgatcaccaggtctgagggaacccaactcaggggcacccccagtacccagggctcgggacaggagatccagctggctgtcggcctggcttggggacaacctcctgtcctctggggcctgctcgccaggccgaagggggcctgagttgggggtaaccccagagtcagggtctcccacttctcgggctctggggaaggggacaaggagatccagctggccacggctctgacttggagatgccttcttctccttctcctccactgtctccagggttgtgccaggtacccatcgaccccgcagggggctgggctcttggcttcctgggagcccattctctgggaaccgggacagagctggggcaccccgatggaactggaggaggggccgggagcgaggaagcagaggtgaccccactgccaaggttaaggggctggtactattatggttgagggcaggggaggactgggaccatgggtatgcccctagcttgccgagattggccctatagagcccaggaggggagccgtggttagggtctgacagttggcgatgtagggagggctggccactggcctcacggcgggcaggacccagggacgaggacaccacacccgtatcactgcaatcaccacctcctggtagagcgaggtaggaggagcgacccataagcggtgactgcttgatgctgctgaggctggtgctggagggcagggacgacgtggggcttgggacatcaggcctgaaggctagggccacagggggaggacgcagtgcccggggagacagcgggtcctcaccgccacagaagccctccacaggctgcgactcagcgtacagacagcggaactcccggtcaaagtcttccacgatgcggcccctcagctgcagcaccatgctagtgtgggcctggctgcaaagccaggtgaagctgggggcagagggacaggggggtcaggaggcaaagtgcaggatcctgggggtcggcaggagtcacagccaggggtgcatacctggtccagcacgctagacccaaaccccaccaccacgagggctcacagcgaggggcagagctccaactccagagtctgtgcttgccctagccctgcttagtgtgtgacctcatggaggccccaacttccccatctgtcaaatggacttgggggaggttccctgaagtcactccagttccaatgggcatagtcattttctataccaagggtattaaagtaatcattcccctagagtgagctcctccagggccgatgcccccgacaccctcccctgagcctggcatgatgcctggcacatggcaggtactcagcccgtgtccgaaggaaaggatgagtggagggaagctcagagctgccagccagtgatgcagccccaggccccccttgcctcctcgtgcctgctcacctgtaactgcccgccaccacttgctcacagtcaatgaggacgaacttctccagggcctgccccgtgaagcggcggccagccttgctgcagtatgtgtccccacacgtgctccgcacacgcatgttctaggtggaagtaggttgggggtgaccttgagagagtgaggctcaagccatgtctctgccccatggggtctctaaccccagacagctaagggaacccaccccccactcccagtgccccccagtgctgactggccacccactggctcccctgccctccctgactccccgcccacacccctggttactgcccctggtcctcactgaccggcaggtgctccccattgaggtccatcttgtagcacatctccaggaagtgcctcaggtgctcctgggcaaggagcaggtacacagggacaccacgccggcttgaggcctccatgaggtcacacagaagctccatgtcagtgaatatgtccatcaccacagccaccacctgggtggggggaggcacacgaaagctcagcgctgcccagggcactccccacatccagccaaacctggggcaggaaactgggcgccgggaaaagagtactggactgaaaatcaggaggccagagccttcaagagcaagtgaacaggaagggcacttagcagtgacctagcccagggcttcttaacttgggcacaggcagatttgactgtcttcttttttttaagagtcagtgtctgtctcactctgttgcccaggctgcagtgcagtggcgtgatcatagctctcttctgcctagaactcccaggctcaagcaatctcctcccaactcagcctcccaagtagctggtattataggcatgtgccactatgcctggctaattttcttttcttttttttttttgagacagagtctcactctgttgcccaggctggagtgtagtggcgtgatctcggctcactgcaacctctgccttctgggttcaagcgattctcgtgtctcagcctctcaagtagctggaatttcaggcatccaccaccatgcccagctaatctgtatttttaatagagatggagtttcaccatgttggccaggctggtctcaaactcctgaccttgtgatctgcctgccttggactcccaaagtgctgtgattacaggcgtgagccaccacgcccagtcgctagtttttttttaattctaattttttgtagagatggggttctcacaagctggtcttgaacccctggcctcaagcgatcctcccacctcagcctcccaaagcactgggattacagtcaaatcccagcccagatttgactgtcttgaacccctagctgtttgaaagcatttgtgtgcatccttctgtgcaccgagtgtttatccatcatcagattctcaaagatgactgtggatcagctgtgctagtccaacactccctctgcactgagccccagatgggacagcagtgagaaggagaacccagaccccaattcccaggcaagttcctggcactcccccgactaactccagcccagctctgacccagggactgtctgtctgaggctcccttctccagggtcacagctacaagccacttactggggtcttcgctgccctttcccagtcctgcctcagtttccctgtgaagccacagaggtctggtgtgaccccttacactgcagactcccttacttgcacccatgccaaatggatccaagttttctgctcagttgagggctgggctggggcttgtgcctccatcccatataaagggctgcctcaaagaggcccctgaaaccttcttggcacctcccagcccccagctggcctttcttcccatggcatatatctgctatgagagtcttctctcccaggcagggccgagaggcaggaggtacagagcatagcactccagctctggagtcagaaagaactgggttcaaacctggactctatcacttcctggtgacacagctttgggtgagtcccttcacctctggaagcctcaccttcctcatctgttaaatggagataatgatagccatgtctcagagttacagggaattaaatgtgaaaatgctcaagacataacagagctctataaacattgggctgcagggcaacgcagcatttcccaaggtcactaggagtcatgacagcccagtgcacgaacctggctcctgacccaggatagaggggtctaaatgggggctgagaaggcgaggcactgggggatgccctagttcacagcacaggcctggccagggtgggggaacaaggacaggcaggaagatcaaagaggcaggggtgaggaggacgacagcagcagcctcactaataaccccattcctgatgccaatcaggcctggccgtcccctgcctggggcacaggaaggcttgccagggaggctctggaagtaccggtgggatcccagcatcctggcttcccatctctgcagcaggagcctaactctccctcaaaccctgccagggatcatctcgtccattcccctggagtcggaggccagggcttcagaagggaagctgtgctcgtgtgtggccagagcctttctgggtgctgaccacccctacctgccctcccaattctctttctcctgagctcccgctccccatcactgagcccagcagcctcctctcctccttcctccttggttccaaagcccagccctcaaggccacgccaaagaggcccacacgctggccccttcccctgcttcaggcccagctgcagatgtggtgcaggagggtagggggcaactagggacctgagccagcaaggagggccggactggtccccaggacccaagtcagagagcccctgtctccccaagccctgagctctatgtcaccatatggacctccctgggcaagtcccaagcccctctctggcctcagtttcttcttctataagtgaaggaggtgactcagatgttccccaaggttggagttcttagtgtggggatcataaaactttttgagaatctgatttaaggcagtggagcatcttccaaggtaaagatgcagcgaggactcctccctccaacctgcaccacttcgtgtgcatttcaggggattgtggagtccctgacacccatgccctgttctatgctcatccatactattcctgggtaccaagcagttgccaaggtaaatatgggatgtcccccttctaggagtttgcaatctaatagtgccagaggtgctggtcctcattctgcccctaagtcgctgtgtggccttgggctggtcccttccctctctggacctcagtttcctcctctgtgagatgagtgatggagagatgaggcccttaccgtgtgggcctggctgaaaaggaagcgcagcaggtccttgatgttcttggccttgtccctctggaagtggaccacagcctgggtggggctgaagcctgtggcctgtggcacctcgggccagcccaggtccaggtctggggggtctatgtcagaggccatggggaagtaagtccctgaggtgacttcagagagcaggctgaggcggtctggcccggaggcctcctgcccctgagcctcgctgagctcagggcccccgcgcacatggctggtcatgtagtccacatccagggcgctcaggaagggcagctcccgctcctcggagatgacccgcaggtaggcagcctcaccccgctccaggagggcgtcggccgccagccgagccgcctcgctgtgccgcagcaccagcggtgagctctcccgccaccacggcagcttcagctcttccacccggccccgcaggggtcccgccatgccctgggctcccaggaccccaggccccgggcctccgaacatgcctgccacgcggctgcctcacccgccggcagggcccatggcccgcacgctgggctggctgcagcaggaagaggagaccagcagaaccgccttctgcccgcccgctcgctgtgtgtgtggcagggcccccaaactgttgccaccctaaatcagagccacgctccaccctattgcccctggcctctggaacctgtcaggtcagccccacctgtctgcctgtgttgggactcgcctgcccagggaagcggcagtgccaggccctcggtgcacactcctgcctccctctcttcctcccagcaacgccgccccatccccaccaggctcccagcaagtctccaaatgctgacttcccgggacccacagaggttgaattacagccaagaggggcccaggcgactcaggaacacacactcacacgcacacgcacacacactgcaggtgggtgagcgactcaagacacccaggaaaagacatgaacacccatgcagatggacacactgacaactgaccgatacacagacatggagtgtgggctgacacagaccgaccacacattgtaatcacatccacttgcataaactcttcacccaaacgccgatgtagagaccggccatgacccccacaacacataccacagtggatagcacgtgccctggctcaagtctgcaaggccctgagagctgaacgactgtcacatggaatatccaaggacatcaacgctggtctgtcccccagccagccctctttttgctcccataatcgtcctgccactctccatcatcttaactgtggtgctcacagccccctggctctctcccaccccggctcggagctgtccttcaagaacctagagcagtggctctcaccctgaccccaggggtggtgagaggtgatgaaatgcagatccccgggccccaccctcctggaaattctcatccagaaggtgtccgtaggcttctggagcttgtcttttttctttttctttttgagatagggtcttgctctgtcacccagtctggagggcagtggcgcaatcacagctcactacagctgtgcctcagtttctctggactcgagcgatcttcccacctcagcctcctgagtagctgggattacaggtgcatgttaccatgctcggctacttttaaaatttttttagagatgggatctcactatgttgcccaggctgatcttgaactcctggcctcaagcaatcctcctgtctcagcctcccaaagtgctgggattacaggtgtgagccgccacacctggccatttttcttttttaattgagacatgatcttgctctgtcacccaggctagagagagcagtgatgtgatcatagcttactgtaacctcaaattcctgagtttttaaacaagtgcccagtgcactgtgggcagtgggctaaggcccacccctgagacatgctgttccagatggctgtgcttgcaacacccttaactccagggatgttcttggcctggtggtggccagaccccagccttcttcccctcctccagggctgagtatgaaaatggttggaaggttgtttcagagaatgggcggacacactgcaaggtcaggaggcaaacagggcaggtagatttctgacctctgccccaacaaagattaaagtcctggagcatgtaccgtgtgtccttcggaggatggtgagcagctttgctctggggaagggggtgagcaggtgacagctgcagctggggagccaggctaggcagaagcggtcaccacctttccacggaggcatgaggtccagcgaggatggcgggaagcgcagaagacctaaagccgtgcctcgcagcctgtttagcactaagcgcacttggtttatctggtctgcgatcatgtccggaacacagggtcttctgtgtccaaagaacttgacacacatatagtgggagggagctgggtgggatttagaggttccggagttgagctgagccctaggaccaaaggtgaatggggctagggctgtgtcttcaaggaccctataagtgaagggcctgggggagcatgggggagccacaggtcaggagttatggcctactccatcccatcccaggtgcaggagcaccgggcactccaaggaggcccttccatgggggtgaggaggctgcaagaggggcagaaggttgagtaaacaaagccagaccgtgggagggtgatgagctgtgggggcagccgaggtggcagggccatcattagggccttatctccagatttgtttgaaggggaggaccaaccagggtcttatctgggtggtagaagtgctcccgggagggagggaggcatgtttgcgtgtcactgagttagttttgtttatcttgcagtgtgtatacatctacttcaggtacatatctttggctctgtatcttttaattgtggtaaaatacgcataaaatttgcctttaaaaaataattcgtggccagacgctgtggctcatgcctataatcccagccct

SEQ ID NO: 352 - DNA, 50954 bp, Homo sapiens
cattccagtaatatacataaaatatttatttaagaatcgactccaaaaactctaatgtactaatcaagatgatatactgtaatttcaaagaatagaaaacaaaggagatttagtgggcaggtcattgtggtctttaaatattttaaaagcagaaaaaggagaatcagttgttttgtgtgggtctagtacgtaaatctaggactgaaggatagaagtttgcaaggaggtgtatttcagtatacaggaagtttttttcttttcttaaaaataaaattaaaatagagctccctgagctctgaaataaaataaaattaaaatagagctccctgagttggagcaggctgcttaggaaaccagtttctcctcagtcgaagtattttgacaggaaggtctaaagtctatgtcagaagtgttatccagcagatttcagccaaccttatctgtagagtcagatagtaaatcttcttggcttttgaggccatgctgcctctgtagcaacttcttaactctgccattgtaaggtgaaagcaggcatagacagcaagtgaatgaatggccatggctgtgtttcaataaaactttatttacaaaaacaggtgcaaagccaaatgtggtctgtgaactgtggtttgtcaagcctgatatattgcatttcctgaattgggtgggaataggacctaaacatcaagccagtcccttccaaatctaagatttcagtgttatatgattctttggtagggtgtaggaaggcatagatatcatttgctaaaatatccctctaggaggagctatccatacccatccattattcactgtgcctgcaagcaactctaataaaaaaaagttctgttagatgaggtttcaactacatgccactaaatactgggaatgttataagcattttttaaaatggaaacctgtgcataaactgtgtgaccctaaaatgaaattagggtccttttgagtgcagcatttttctacctttttttatgtatcatttacaaataaaaattatatatatctactgtgtacaagatagtgttttgatatacatgtacattgtgaaatgattaccatagtcaagctaattaacatgtccattattttacatagtgtgtgtgtgtgtgtgtgtgtgcgcatgtgtgtgtgctgagaacccatcagatctattctctagtgaagttcatgtatacgatacagtattatgaactatagtcaccatgtttgcattagtcagggttctctagaaggacagaactaataggatagatgtacatataaaggggagtttattaaagagtattgactcacacgatcacaaggtgaagtcccacaatagtctgcctgcaggctgaggagcaaggaagccagtctaagtcccaaaacctcaaaagcaagaaagtcaacagtgcagccttcagtctgtggtcaaaggtccaagagcccttggcaaaccactggtgtaactccaagagtccaaaagctgaagaacttggagtacaatgttcaagggcaggaaacatccagcacaggagaaagatgagggccagaagacttagccagtctagtccttccacgttcctctgcctgcttttatcctagcccggctggcagctgagatggtgcccacccagattgagggtgggtctgcctctcccagtcaactgactcaaatattaatctcctttggcaacaccctcacagacacatccaggaacaatacttggcatccttcaatccagtcaagccgacactcaatattaaccatcacaagtccaccccttgtctacttgaacccatacgcatctcctgaaatcatatataatcttcaaataaagataataataaggtcataattatgttaggtaatacataatacagctatccttcgtacaaccagaagtgtaccaatccccaacccaaatgctgttacataaagttaacaacatttaaatgctgatttgaagtaaataaatcttatgtcacatgataaaggaaaaagaaaggaaataaaatgaagatattttcttagtacaagtgtatacatacacaaacatgttcctaacaaaataaggaggaaatatgacaattacagtcctcatttctgcagctggtcacgtgggcatagccggtattgatgactaccttcttctactacccattctgtattccttttgccttcagcaagcatctcagcaggttgtggttttttacctggtggagtgacccaaacattcattcctaaggggtctgggccttatgtagcactgcctggattgggctgttgtagtttcccattgaccttaatcacagggcatggtaatactaagagttgcctgaagggatctcctgtattccttgcatactcttccttacctccactgtggagtaatagactaacttcatcttgatagtccaggtcaatcaccacagccaacactgcaactcccttctgagcctgttgacttagaggtaaaaggatctcaaagtgtccaggtggcaagcttaacttccagtttaatggaatccttgttgtgtcttctggtggcagcatttttccctctgaaactaacacaactaagcaagcagaaggtaatgtattgggaacaggaagcaaaaattttgctagtggatagctaggggtgatggtgagtggtgccacttccacttctgccccttgattcctagacctgtgaatcctggctatgggagaaacggtgccatatattggatgttgattcagagcatacatagccttctggagaattttgccccagccctgcaaagtattgtcccctagttggcattgtaattgtgacttcaaaaggccattccaccgttctatcaatacagctgcttcaggatgacgggaaacaatgttgtacattagatcctccaacttattcacactgcataattggaactttggaccttttgaccaaaaccaccccatagctggcactccccatactctggctaccaccattctactctctgttagcatgactttgacttttttagattctgcatgtagttgtaagtgcctctcttcagatgatcatatgatttttatccttcattttgtgaatgtggtatatagcatttattgagttgcatatgttgaaccatccttgcatcctaggctcagttgatcatgatccttttaatgtgttgttgaatttagtctggctaatattttcttcaggatttctggatctatgttcatcaggaatattgatctataattttaattttattttattgtgatgtccttgtttggctctgctatcaaagtaatgctggcctcattaaatgagattggaagtgtttcctccttttcaattatttgaaagagtttgagaaggattggtgttaattctttaaatgtttatagacttcaccaatgaagacatcaggtgctgagcttttcttagttgagagtttttatttctgattcaacctccttactcattattggtttgttcagattttctatttcttcctgattcagtcttggtaggttgtatgttcctaggaatttatctatttcttctacattatttaattagttgatgtactgtttttcatagtagtctcatgattttctgtatttctgtggtatccattgtaatctttcctccttcatttataattttatttgagttttttttctttttctcctaattaggctaaagatttcttgatttatctttttaaaaacaataacagtgtcattgaccttttctgttgtttttctagtctctatttcatttatctctgctctgatctttattattttctttcttcctctgtctttgggcttagttttttttttttactttcttattgcttcaggtgtaaagttaggatatttcagatctttccattttcttaaggtaggtatttatcgctataaacttccttcttagaactgcttttgctgcatcccataaattttcaatgccacaaattttgtttctcttttcatttttctcaagacattttttgattttccttttgatttcttctttgactcattggttgttcaggagtatgttaattttcatgtatttgtgaattttccatttttccttctgttactgagttctacttttatgccattatggttggaaaagatacttgatatgatttcaatccttaaatttgttaagatgttttccatggcctaacatataacctatcctggagagtgttctgtgtgcacttaaaaagaatgtgcattctgctgcttttgaaaggaatgttctgcacatgtccgttaggtctattggtttatagcattttgaaatccacagtttccttgttgattttctgtccaggtgatctattcattgttgaaagcatgttgctatttatttctcctttagttatgttaatatttgctttatagatttagatgcactgattttgggtacatgtgtatttacaattgttatatcctcttaatgaattcacccttttaccattatataatgaccttctctgtctcttgtgacagtatttgacttaaactctatctcatctgttataaggatagccacctctgctttcgtttggttatcatgtgaatgcaatctctttttcatcccttcacttccagcttatgtctgtccttaaagctaaagttagtctcttacaggcagcatatagttagatcttgttttttattcactcatccactctctcttttgattggataatttaatacatttacatctaaagtaattattggtaggtaaaggcttactactatcatgttgttaattgttttctgattgttttgtagttcctttgttgcttctttttgtctcactgtcttcctttgtgacttaataacttttttggagcaatttgctttggttcctttctctttatgttttgtatatctactacagactttttctttgtggttatcatgaggtttacataaaatatttcatagttataaccatccattttaatctggtaacaactttgactgcatttaaaaatactgtattttaacttctcctcctcccacattttattattcatgccatagtttatatcttttgtatgttgtgtattcattagcaaattgttgtagttatagttatttgttaatacttttgttttttaacttttatactagagttaaaagtgactgttgcacaataacagtattggagtattctgtatttgactgtataagaatacctttaatagagttttattctttcatttgttttcatgttagttagtgtccttttgtttaaacttgagaattccctttagcattttttgtaaggcaggtttaatggtgttgaaatcccacagcttttatttgtctggtgatatgatttgttcctgaacttccacccaaatctcatctcgaattgcaatccccaggtgtcaaaggagggacctgttgggagatgattggatcacgaggtgttttcccccattatgttctcatgatagtgagggtgttctcatgagatctgatggtttaaaagtggtggttacccgtgcgcacatgctctctctctctcctgctgccttgtgaagaaggtacctgcttccccttcaccttccaccataattgtaagtttcctgaggcctccccagccatgaggaactgtgagtcatttagacctcttttgtttataaattacccagtctcaggtgatatcttttagcagtgtgaaaataaacaatacagagaattggtactggcagagtgaggtactgctataaagacaacctgaaaatgtgaaggcaactttgaaactgggtaacaggcagaggttggaacagtttggagggcttagaagataggaagatgtgggaaagtttgaaacttcctagagacttgttgaatggttttgaccaaaatgctgatagtcgtattgacaatgaagtccaggctgagatggtctcagatggagacgagaaactattgggaactggagcaaaggccattcttgctatgctttagcagagactggcagcattttgcccctgccctagagatctgtggagctttgaacttgagagagatgatttagggtatctgtcagaataaatttctaagcagaaaagcattcaaatataacctggctttttctgaaagcatacagtcaagtcatatgcgttcacaaagagatggtatgaaattggaacttatgtttaaaagggaagcaaagcataaaagtttggaaattttgcagcctgaccatgtggtagaaaagaaaaaccaattttctgaggaggaattcaagccggctgcagaaatttacataagtaatcaggagctgaatgttaattgccaaacaatggggaaatgtctccagggcatttcagaggtcttcaaggcagcccctcccattacaagcccagaggcctaggagggaaaaatggtttcatgggccctgctgctctgtgcagccttgggacttggtgccctgtgccccagccactccagctccagctgtgactaaaagggtccatagctcaggctgtcgcttcaagggtgcaagccccaagccttggtggcttccacgtgctcttgggtctgcgagttcacagaaaacaagagctgagctttgagagcctctgcctagatttcacaggatgtgtggaaacacctggctgtccaggcagaagcctgctgcagggacccagccctcatggagaacctctattagggcagtgcagaggtgaactgtggggttggagcccacacacagagaccccactggagcactgcccagtggagctgtgaaaagagttcccccatcttccagatgccagaatggtagatccactgactggaaagttgcaggcactcagtgccggcccatgaaggcagccgtaggggctgtaccctgcaaagccacagggacagagctgcccaaggccttaacagcccacaccttgcatcagcatgccctgggtgtgagacaggggctccaaggagattattttggagctttaaaatttaatgacttccctgctaggttttgcatatgcttgggacctgtggcccctttattttggccaatttctcccatttggaatgggaacatttacccaattcctgtacccacattgtgttttggaagtaactaacttgttttttattttaaaggctcattgagggaagggacttgccttgtctcaaatgagactttggactcggacttttgggttactgtggaatgagttaagactttgggggactgttggaaagacatcattggttttgaaatctgaaaaggacatgagatttgggaaaggccaggggaagaatgatatggtttggctctgtgtcctcatccaaatctcgtcttgaattgtaatccccacatgggattacatgggaggggcctggtgagaggtgattggatcatggaggtggtttcccctgtgctgtgatctcatgatagtgagggatttaaaagtgacagtttcccctgcacatacacactctctctctcgtatcaccttgtgaagaaggtgtctgcttcccctctgccttccatcgtgattataagtttcctgaggcctccccagccatgggtaactgtgagtcagttaaacctcttttgtttataaattacccagtctcaggtagtatctttacagcagtgtgaaactggactaatacatctgggaaattctttttgtctccttcctttctgaaggacagctttgcctgatattatattcttggttgccaggttttgtactttcaatactttgaatatatcatcccactctctcttggcctacatgatttctgctgagaaatccaccaataatcttatgaagcttcccttgtatgtgaagaattgcttttctcttgcttctttgaaaattctctctttgtcatggtgaggatttcttttttttttttttttttttagatggagtctagctctgttgtccaggctggagtgcagtgtgcagtggcgcaatctcggctcactgcaagctccgtctcctgggttcacaccattttcctgtctcagcctctggagtagctgagactacaggtgcccaccaccacgcctggctaaattttttttgtatttttagtagagatggggtttcactgtgttagccaggatggtctcgatctcctgacctcatgatccacccatcttggcctcccaaagtgctgggattacaggcatgagccactgcacctggccgaggatctctttatatttaatctatttggagttcttttgggcttcataaatctggatgtttatttcatttatgtctccaaattttgagagttttctattcttatttttttaaataagtttctgcaactttctctttctctacttcttctggaactcttctaatgcatattaattttcttaacagtgtcctataagtcttgtcagctttctgcaatttttatcattccttttattactctgactgggtaatttcaaatgacctgtatctgagcatgctgattctttctcctgcttgatctagtctgctgctgaagctgtttgtgaattttttcaattcagtcattttgttctttagctccagaatttctgtttcattcttttttatggttcctatctatctttttgttgaacttctaattttgctcatgtattgttttcctgattttgtttactgtctatctatattgttttgtagcttattgagctttcttaaggcaattatttttagctcttgtcatgcagtaaagatctccatttctttagggtcacctcctgctgctttatttccttcctttggtggtttcttgtttccccgattatttgtgatcagtgtggccttgcactgaagtaggcacctatttcagtctttacatactagcttcagcagagaaagccattcactagtcagattgaccagagattgttggtgggctgtctgttggggtctatgcacaggatttctgctggagttctaaggtgggaagggctggattctgggttcattcactgtggttgtctgtattctgtgcacaaggactggcttgaagcatggatccttgggggctgacttggcactgaaatgagccttaagcctgcgtctgcaggggccagcctaacatggggatcacctggcacctgagttcatggggataggcctgttcctgagtttattcaggctgtcctgggaacaaggtccactggggtgagcccagcatctgggtccacatggcccagcatggagccaagatctctggaggctgacctggtgctggatctgcaggggatggcctggattctaggcccatgggtgccaacttggagcctggggttgctggggctaacgtggaggctagatagagtcttgggggccaggctagagctggagcaggcctgaagtctaggttttgtgtggccatcttggagcctgaagccccaggggctgacctggtctggggtgagcatggggctgaggccacagaggctggtctggcctgtggcaggcctgaatcctggtgctggggtttactggagtgggcttggtgcttgggatctgtggtgaagttaggttctatcttaactgtccctcctccatgcaagagggcatctctctccatactgtgctgcccaggcttgaaggtgagatgacaccggtaatgtgaaattgtccttcctatacacttctatgtgtcttttcttatttctgtgctgcaaccaggtggcataacctctcacctgattccttagctctagtgaagttattttcgtgcatggatacttgttcgaattgatgtttctgcaagggatgagcgctagaaactcctgttctgacaaactcctattcctattcttgctgacatcactccctgaaatagttaatatacttaacagctgaacacggataggatgttcatggaatatgttgacaggacaaaaagttgaaactgttggcagaaacccaaagtcaatattgaagccaagcaaaatattgcctgcagtgccacattagaacagcttgaagaccgttcatttttaagtgacaagagactcacctccaagaagcaattgtgttttcaggtagcaaatttttattattctgattgtttccaaataaactataatttttaagtataattttttactttatgagaaaattaatcatttatattctaatttcctgagtatgtagagagtatagataatgttcctttatgtagaaatatttaaatgtaagatgattttaaatcagaaagaatatttgattgatttaaaatttttaaatgggctttaatattttcagaggttttctttacttagggatttttggactgacattattgccattatttattaattttgtttttgcccaaatcaagaggtttcataattgtttactctctctctaccaattccctttccaacattactagccacagagttggccaatgaacaataaacacaacagtagtctggaggtctcaatttgtatcttgggaagcattataaattttccaactccctagacacaaatgtaccaaaaaaaaacccttgttttctataccagtaattgtgtgctttgtcttgcaattcagacatttacaagaaaatctaaatcaccttaaattaagatttatgttaaatgtggtctaaaaccagcagagttatgtattgttttcttttttagaatgattttattcaagcaagcaacttatttcatttccttgtttgctacagtttcctgtggtaagtgaattatctataaaacatggaattcaggctaagacaggagtagccaagcaagtggcaccacccctggagaaagctattgaacatacagcttcgggggtggagattgtccctgatgattcaggacacgtgtctatttaatgttccacaacaaggaccacttgtcaggtatattgctgtagacatatgttgcagaccagaggaaggagctcagaagtaggaatgtcttgggacttgtgttaacaaaaacttctgttcgcagatgacactctgcaaagcaaaacttgaaacaaaaaaaaattagtcctctatttttattatcaacagtaaaaaattaaactttatctgaaaattcaaaagagtgctaggcattttatagtgtctgggtccaatccaagtatctgttaggaacaccatacatagttttactctggaccgctagggaaccatttcaaaaatgaaagtaactggtttaaatttaacttagcaaaccatgcatttggatagttctaggtgaatagctttcaacaccagatttagatctcatttctctattaatttcattaatttttggagaataaaaatgattctggacatttcattaatcattacagagggagttttctctgtgtccccacaaggcatgattctgggtctatggtgacttaagagggccacacaacaatgagtatttaattttcctcagatgtatggctacaataaacatctataggtaaggtttacattcataaagagacctttttttttccaggaaaaaagacttttattccccctaaatcacaactcccctgtgtctgtccctcaaccctgatttctcttctaaaccgtaatttacaaacccatgtgcaaacccactgaaaggtgagaaggagcataagccagagacactgggaaccacagccaactacagggggtttttcatttttttgttttgttttgttttttggcaaaataaatcatgattatggctaggaaaatcagggatgtaagtaagcaaaaatttagaaactacatattgcatgtagtccccaaattcagaaacagtcatcgttaaacatcttttatttagtctttcagatatttttctacatatacctatttgcacatttcacaaaaaagagttattaactgtggacactctttgacttgcattttccacttatagctatcttttggtgcaaataagtaatatattttggagcttgctattcttctctttttatggtatttttgtgtgcacattcttatgctcttattcagttatttctgtagaatacaatttttgaaataaaaatactagattcaaaggtgtgaatatttttgaaggttttgtggtgtggtatcatgaaattaggtttcagaaagtttactccatagttgactttttctaccagctaataagagtgctcatttaccccacttaggccaactctaacaggcttctgttgctttgcatcctgacatatttatctttctggaaacagtgtcctaatttatttctgcagagctactgcctctcagttttggtccatgtggttctggtgaccctgattcttctgctgaaccagaaagtgcacacatcctcctggctgtggtgacccaatcagagccaacgtcttgcaatgaagcttttctttagacatctagaaataagactcttatgttttttttttccaatttgacttgaaacttaagacaatacacaggcctgagttgttggtactattttgctactacgtggagcttgagagtaatggtaacaccaagactggagcaagtggaaggagacatattgtccactgatgctatcagttgagcacaatgtgcagttactttttaagccagattcaccatgggctttttggctcctgaaccaatagatttcatttgttttcaagccactttgtactaggttttccatcatttgcaatcaaaaccagtatacaaacactggttatttaatttttcatttttgctaatctcagggataaaatggcttctagttgttttaacttggctatatttgtgattcttcccattttcatatacttactaatcacttctatttcttttgtaaattatcttttcatatttgttatctaattctttaaaatttgagtactttaattctcattattgtttgtggaattgttaaacaagactgaataatctgcccaaagtccatggacatgggggcccatgtaaaagctttgaaagccaccatcattatgagataaattatataatagtactttacataggctccaaaatacagcacagacacagctatcattgtcatggtcatcattatcatcatgatcaccaacttatgaggataagcaagaacacctactagaagtttctttccattcagcaacaaaattggtgtctttctagtcactcccttccctgactgtcacatagcagttcacagaggctcagttgcagaatgagaagctctgggccaggacctgccattgtatgcatccttgcatgggaactgggggctggaagaggagtgactgcttgataattatgagtcagtcaaaaccaccaactgtctgaaaaaaataggcctttttgtaactagtattgtcactaaaccaactcctccatgttttgtgcatacatgaaatctaggcaatacacttgtattcccaaaagcttccacttgaagagatctgtgctctttccaaatataaaccttacccgagaggtggtcatcttggccacacctcagagagggagagaggcagtcttgttgggttgggtggtcataatggggctcagggccaaatccccagggggtaggatagtgcagagaagatggcactctccagtgcttaataaaatgcacgtggtctaagctgcccactccctcaaaggcaataaaaaataggtactatttaaattgaagagtaactactgccccagggaatggacaggttgtcattggaatagccatggttaatggtcccagttgacaactgaaatgaatgtgctacctgaacaggaaagcttattaaccagatttcaaagacagtctttcccggtaaatccaaatttacaaattaaagccagtaaagacaccgaattctctaataatatgtggggtgcagtatattttagagctgggaataattccaaacagcaaatagttcaaaatttattttcaatttagcatatgcatgcatttgcttaaactgtcttaaaaatgagtaaaaaatactgtcagtttgtttcaatcatactgagatgaggaacaatgtttagcattgcatgctagaaaaggacacaggattgggagtcagggctgggtgaccgtcacaggactttcactaactgtgtggatcttgggcaagtctgtgtgccctgagactcagttatttaactttcttttaaaaaacatagtccagatgcagataacaaagcctgcctctaatttcccttacagaattgtgagaagctggtggagatgtttgttacaaaagtgttttgaaaatagagcaaatattattctttttaaggcatgatgttttcatagcatgtcaggcaacaggaaaaaactaagttaggattttattttattgtggggaatttatgtgcaaattattgtgcaatttaatgaaaataagccaatgttttatacagaagtacccagaaaattaaataacactatacattgttcaaatagttgccttaatatattttattttctcagcataattagagttgtattatacaggtctttgagtagtcagtcagtgggagaagttaagacaacagatatctttttattaaaattattatatgaattatcgcaaattaatttttatggttctgtcacaggatgtctgactcaactctatgaaaacgccttcttcagaggtggggatgtagcttccatgtacaccccaaatgcccaatactgccagatgaggtgcacattccacccaaggtgtttgctattcagttttcttccagcaagttcaatcaatgacatggagaaaaggtaaaagttggtatttcattattggagaagctgtttttcaaaactgaatcagttttgtgcagaaaggtgtagtataactgagagttcttcctcacacggggttcaaggaccagcttcagcaaaatcccgtcaagtggttcttacaaatgcagattcctaggccacaacccagatctgctgaaccaaagtttcttgtgaccaggaatctgcattttaaacaatcactgtgtttctttaaagtagtagaagctagtcattttctattcaaagcctcaaaatgcttgaatatcattgggctaagggattgtctcaagaaagagtctaacaggtgcacatttcatctgaataaagaaacagatttaactgtgtgacccatgatcacattagcggatagcacagtccaaagaaaataacataagacaagcattttgctgagaatgtaattgagaaagatctagaacttgtgattttgggacagggcagttctaaatggggcctatagtgagccagtttgggcacctgtggcatgatgctatgtatggtgtgtgtgtgtatgtgtgcttgtgcttgtgtgaatatgtattattaactggaaatttgtaaaagtattggaaaaatagtacttacgattttgtgtgtgtgtgtgatggagtctcgctttgtagcccaggctggagtgcagtggcgtgatctcggctcactgcaacttccacctcccaggttcaagcgattctcctgcctcagcctcccaagtagctgggattacaggcacgcaccaccacgtccagctaatttttgtagttttagtagagacggggtttcaccacattggccaggctggccttgaactcctgacctcgtgatccacctgcctctacctcctaatgtgctgggattacaggcatgagccaccgcacccagcggtaattacaatttttattaggtcagagagatgcttattaatcacgagccacagtttcatcttaatgatttttccttttgattaatatccagagtaagcttttctttgttgttcccatttccatgttcataactctttactcatcttcactctatgtgagtttaccaactagaaattggatagtcattctctgatcccacatgttaaacttgtagagaaaactcagattgtatgtgaggatcatcatattaaaagtggaggaaggttctagaattcttataaataatgaaattaacatgaaggtggacatctaagacagagggaagtcttccattaagtgcagactacaaggagttaataagcaagatgaacacgatatacaaatccagctcttatcactaagttaactttttaagtaaatgaaagtatttgcaaaaataattaccaattgagaacatagttgcctgaaagtttaagaacacaggaaaaatcattaactctttaatatggttgatttcctgtacttaaaaaatgtgagtgtaaagaaaacgcagtgatggagttagatattatggggtgttataaaattagctctaagagtgttctttccagcaagtattggggaagctatattattttccttattcctggttttatttgttagtgtgtagaaaatgctagacatttcctcaatgtatgtttattattctacttcctaagtaaagctacttttaaaataggtttggttgcttcttgaaagatagtgttacaggaaccctgccaaaagtacatcgaacaggtgcagtttctggacattccttgaagcaatgtggtcatcaaataagtggtaagttgtgaatttcttagctacatttgagttaatattggatctcgcttagaacagcttttgctcaaagtttgtactgctacagctttttggaaggcatcactcataaagataggagatggggcagtattctggacacaaaagagggacccatattcatctggacacttctattgtctttataaatcaacacatacttaatgagcctctattatttatgaggttagcgctcaagtgtaagatttgcagaaaatgaatccaaataattgtgtctcgtttccagataagaatttttaagaaaacacaagggaacatctctctcaagttcacttgagggtaatttttacatcagtgattctcaaccagcagtgattttgtctcttccactggggacatttgacaatgtctggagacatttttggtggctacaactagggaggatgctattagcatttactaagtagaggccagaatgtttgaatgctgaccaacattctacaaggcacagggcagtcgtccacagcaaataattttctggcccaaaacgtcaacagtgctgacatcaagaaactctgtgatataccactaggcccaaattgaagaactgagttctgcaaatcttgctaagaataatacttcctaaaggaaacttgaggactaggatgctagagaactttgattctgacatctgaagctactgatgtcttgggaaacagtttccaatgctatcctaataaatttaagacaaatgaactatttctcaaacatgactgggactgataagaaagtgaaaagtgctgaaaagattcaactgatgggttgtcagaatcttaaaataactgctgttattctatgtatgactatatatcattactattttattttcattatgcacaattaattttgtaggttcaaatttcagatgtttttaaatttgtcatcctttcctccctcattgatatcacctcttcaatacgtacacactttgagcctgctgtttgcattttaaccagttatcaaaggatggcaatgccttcattataaatgtgggcctgacttagccagtataataggtgtagtctacgtgaggtggagtacatttcctattttaaaagatcaatttttatgttaatccaatttggtataaattattcgagtaagtgctatttctgattgttgtatcttgtagcaaaatttaaagaaaaagtaatttgtgcctttctcaatattcctgttattgttcatgtattctaaaactcactgttactcacttagcttgcttttaatgttttttaaagtgaaaaattgttcccaagtacataaaatctctacactcaagaacaattctagtcaaaagcatttagagcttccgtatgaacacttaaagagtttttatttgtaagagtcgcatcccaactcttagcctgttcttttctcacatgcagaaaaataggaaagagacttcgtttccacagtctgcaaattcctgtgtttaagaaccacagtgaataatccacctccctgcccaactcatcgtactgtcatatagttttcctgacagtttgtgtattttctgtctttcccacccttaaatttagttttatgacttcaaccatacttcttaggagtggaaaggtatctgtagtagattatggtttattccacataatcttggggaataaaactttaaaaaagtatacagtttatacttctggttacattacttccttaaccaaaagtctaaccaagaaatttgaatctttaaaaaaaaaagaggccgggcgcggtggctcacgcctgtaatcccagcactttgggaggccgagacgggcggatcacgaggtcaggagatcgagaccatcctggctgacacggtgaaaccccgtctctactaaaaatacaaaaattagccgggcgtggtggcgcgcgcctgtagtcccagctactcgggaggctgaggcaggagaatggcgtgaacccgggaggcggagcttgcagtgagtcgagatcgcgccactgcgctccagcctgggcgacagagcgagactccgtctcaaaaaaaaaaaaaaaaaaaagagcctaattttgcttcactgtctgtgaaaagaattatctgtatcttttgcatgtaagacaaatctcaatgaaaagggtgcttaaatagaagttaacactattttaaagcaagaatggaagtggtttcatcatgcgtaaacaacaactctccacattttgtaatgattgatctggatgcaatttgtcatcagacaggagaagtcgaaagcaaagaaataacactgggagatagagaagctctttcattcaatgcgaaaggtcaaaggcacatcagtttctttaataatgcaaacctcagcacacattatcagtgtcctcattattattgccttgtttatttcccactgctcattgataatttcaacgtgaaatttacctgtattgctgcatgcatcttgcagtttaagaagtgaagtaacccaatttcaaagctagtgctttagggaaaatattggattgtatttacttcaagcagagttcgataatttatgtacataataaaaattttaaatcccttagttaatatagcagttgccaaaactgggctattatcattctaaactaccaacccaaatggtagtgggtatctaatctacctctagaaagaaaatggactgtatttgctctatgtatttttcttgtacagcttgccatcgagacatttataaaggagttgatatgagaggagtcaattttaatgtgtctaaggttagcagtgttgaagaatgccaaaaaaggtgcaccagtaacattcgctgccagtttttttcatatgccacgcaaacatttcacaaggcagagtaccggtgagtacaattcaaggtgtgtgttctttgtattggtgcctccaggatttcactgtattcttcttaacctcttttgttcccaaactaaaaaccaaacagggcttttattctaaccactttcctcatttacttactctattttatttttttatcttttatttatttatttatttattgagatggagtcgcgctctgtcgcccaggctagagtgcagtggcgtaatctcgactcactacaacctccgcttcccgggttcaagcgattctcctgcctcagcctcccgagtagctgggattacaggcgtccgccaccatgcctggctaatttttgtatttttagtagagtcggggttttactatgttggtcaggctggtctcgaactcctgatcttgtgatccacccacctcagcctcccaaagcgctgggattacaggcatgagccactgcgcctcgcccttcattttttaattaaataattcatttaatttcatttgtttctctactcttttcccctggcatgtaattgtaccgcatcttcaaagcctgacatcctcttcccctacttctccaaagctgattcttgcaggtctttcctcaaataccgtcccctccaaaagcccatttctgagcattctcttttaagtcacactcagctctgtttatttcattcatagagctaatcacaatttgatattaacttgtgatttttttccttatttttaaatcttatttttatttgcatagatgtatggggtacaagtgtaattttgttactttgatgtattttacagtggtaaagtctgggcttttggtatatccatcactggagtcatgtacattgtacccactaagctatttttcaacgcccgcccccttcccacctctctgtcaccttcccagtctctactgtctatcgctccatgctctactcaattttggtgtcattttttcctgaagcaaaattttggtgtcattttttctgaagtcattttctgaagtctgtgtcatttttcgctttcctgaagcgaattttggtgtcatttttcctgaagttccgtttgccccacacataggccttgcttatagaatgagggtttagtgtcacggagtctcctgcctcattctcaccctaacttttcctttacccctttgcgaggggaaggatgtccattaggttaataatgcagacccctaacccactcattatcagggtcattgtttttccactgtgcattttaatactaactgttacctgcactgctccctgcccctcaaagtgcagaaagcaaagtaacctcttttcttcccattcaggaacaattgcctattaaagtacagtcccggaggaacacctaccgctataaaggtgctgagtaacgtggaatctggattctcactgaagccctgtgccctttcagaaattggtaattgtaggactacttcactttgtgattgtggtaggtggaataggagcccccagagacgtccctgtgctgagccctgggacctgtgcgtgtgttcccatagctggcaaaagcgtttctgtcaatggcatgcagttacgggcttcgagatggggagtttactctggattttctgaatgggcccaatgtactcacagggttgagtgctcacaaggctcataagaaaaagagagaggcggaaggctcagagccagagagagaggtttgaaggtattacactgctggctttgaagatgaaggtccgtgagccaaggaatgcaggcggcctctagaagttgaaaagggcgaggaaagagtttccctgtggagcgtcctggaggaagaagccctgctgatgtcttgattttagcccagtaagacccaatctctagaacagtaagataattaatttgtgttgtttttaaccactaagtttgtggttatgcccctagagcagcagttataggaaactagtacagtgatactgttagagttataggacagtgatataggacagtgatactgttatagttataggaaactagtacagtgatactgttagagttataggacagtgatataggacagtgatattgttatagttataggaaactagtacagtgatactgttagagttataggtacagtgatattgttatagttataggaaactagtacagtgatactgttacaggtacagtgatataggacagtgatactgttataggaaactagtacagtgatactgttagagttataggtacagtgacataggacagtgatactgttatagttataggaaactagtacagtgatactgttagagttataggtagagtgatataggacagtgatactgttatagttatagaaaactagtacagtgatactgttatagttataggacagtgatataggacagtgatattgttatagttataggaaactagtacagtgatactgttagagttataggtacagtgatataggacagtgatattgttatagttataggaaactagtacagtgatactgttagagttataggtacagtgatattgttatagttataggaaactagtacagtgatactgttataggtacagtgatataggacagtgatactgttataggaaactagtacagtgatactgttagagttataggtacagtgacataggacagtgatactgttatagttataggaaactagtacagtgatactgttagagttataggtacagtgatataggacagtgatactgttatagttataggaaactagtacagtgatactgttatagttataggacagtgatattgttatagttataggaaactagtacagtgatactgttagagttataggtacagtgatataggacagtgatattgttatagttataggaaactagtacagtgatactgttatagttataggacagtgatataggacagtgatattgttatagttataggaaactagtacggtgatactgttatagttataggtacagtgatattgttatagttataggaaactagtacagtgatactgttagagttataggtacagtgatataggacagtgatattgttatagttataggaaactagtacagtgatactgttatagttgtaggacagtgatattgttatagttataggaaactagtacagtgatactgttagagttataggtacagtgatataggacagtgatactgttatagttataggacagtgatattcttatagttaccgtggtatagttatagttaaaggtacagtgatattgttatagttataggacagtgatattgttatagttataggacagtgatgtagttacagtgatataggtacagtgatattgttatagttataggacagtgatatagttataggacagtgatattgttacagttataggtacagtgacgttgtaatagttataggacagtgatattgttatagttataggtacagtgatgttgtagcaaaactgtaaggtcattccttggttgtgtccctatctagtgaaatgactctaccaggggtagggaaataaaactctgtcgtttcacacataaaggtaatttcaatggaattatccagaaaattgccatgacattccacctcatttagcatgtcaggatgttaatgacaagatgttactaaaagcaaatcccttacggccagttttccgcagtactgggtgctggctctgtgcctggccctgtattgggtgctgggctaggatttccctgtggaagattgggaaggttggttacaaggtggctattttcctgtctcctctttgcgacagcacaccttctccatggtgtgtgccaggttcacgtgtactggtgatttaattttaacgttcatattatttttttctgggagagtttttgaaggctgccaggaggcaggactcgatgcaaacatgctccattctgtacccagccctgttgctggaaggatttgctgcacttacccagggaacaggcaagctcgtgctgtggctctgggctgtcacagctgctgtccacacctgggagagcaccctggatggctcatctgtgtacttgctttcttgttaaattgcagtgagttcacatgtgatttaatcggatcaaatggcctttacagactgataaaaatatggctgtttcaggtggtgttttgagctgctaagggcgtggcttttcactgagtacgtggtccccgttcctcagggaacacccagtagccacatgcctcctaaacctagagtagggctgtctcctggcctaactgcccaaatgagattcataagttagggatgatctgtagttatcactacagatttgtccttggtttcaccaaggattttcctaattttacaaacaaaacccctaaggctcctggaaggagggtagaagtgaaggtgctccgggggcaacacagctgatgagctgaaccagaactcgacccttgggtcacacacatttcacagtgctcactccaccttttgtttttttaatggatttaatggtgttttaaagcctcctgcctctcaacacatatgaattcattatatttacagatttccttctcttgtggtccatcttcctgcatagatcttgagagatgtcaggctaaccacgtttcctcagttaatttaacaaaaccatttgcaactctgacatggaaaattcctaccatgtgacttattaatttatcaattgagatggtacacatattttcaagccaaaaggaggaaaacataaattggaaaaaaaaggtttttttatttttatcacctctggggaagaaagtctgataaacgaagctggttgataaaattgcaattaggggaagcaacatcatggtttctgttcggaggctaaccagatggcatacttgaaatagagaatgtcctagaaatcaactggttgcttggccaaaatatctataaatagtgcccaacatattagataggaaaagcaaagtaaaaacaattttaacaggttaggacattgggctgaagtattgcatatatttaatgtcatgtgcgtccgtgtgaagagaccactaaacaggctttgtgtgagcaagaaagctttttaatcacctgggtgcaggcaggctgagtccgaaaagagagtcagtgaagggagatggggtggggacgttttataggatttgggtaggtagtggaaaattacagtcaaagggggttgttctctggcgggcagcggtggggggtcacaaggtgctcagtgggggagcttctgagccaggagaaggaatttcacaaggtaacgtcatcagttaaggcaggaaccggccattttcacttcttttgtctttcttcagttacttcaggtcatctagatgtatacgtgcaggcctgggcccagaggcctgacattcctgtcttcttatattaataagaaaaagaaaacgaaatagtggtaaagtgttggggtggcgaaagtttttgggggtggtatggagagataatgggcgatgtttctcagggctgcttcgagcgggattaggggcggcgtgggaacctacagtgggagagatgaagctgaaggaatattttatggtaaggggtgatattgtggggttgttagaagcagcatttgtcatatagaatgattggtgatggcctggatatggttttgtgtgaaatgagaaactaaatggaagacacaaggtctgaataagagaaggagaaaaacaggtgttaaaggactaagaattgggaggacccaggacatctaattagagagtgcctaagggggttcagtgtaattacttgcttggttggtgagtttttgggctctatccttgacagagtcctcctttttaagttggaggctgagcttggtgaggtgtgtttttaaaagaccattagtctgttctacctttcctgaagattgaggatggtgaggggtatgaaggttttactgaataccaagagcctgagaaactgcttgggtgatttgactaataaaggccggtctgttatcggattgtatagagatggaaaggccaaactgaggaattatgtctgacagaagggaagaaatgaccacggtggccttctcagaccctgtgggaaaggcctctacccatccagtgaaagtgtctacccagaccaagaggtattttagtttcctgactccgggtatgtgagtaaagtcaatctgccagtcctgggcgggggcaaatccccgagcttgatgtgtagggaagggagggggcctgagcaatccctgaggaggagtggagtagcagatggaacactgagcagttattttttgaggatagatttttacgacggaaaggaaaagtgaggttttaagaggtgggttagtggcttgtaacttacatggaagagtttatgaaatgatgacagaatagaatgggcctgtgaggctggaggagatattttccttggtccaagaattatttgccttgtgtgggaagagattgataggtggaagtttcaatgggggagtagatgggagtgacagatgaggaagaaaaaaactggctgtgagggatagaagttggaatgctcgctgcttttttagctaccttatcagcataggcattgtcctgagcagtgggatctgatgccttttggtggcccttgcagtgaatggcttcagcttcctttggaagtaaagtggccttgagaggagtttttattaaagaggcattaagatggagaacccttgtgtagtgaggaaacctccttcagcccatataaccgcatggtggtgcagaatatggaaggcatatttagagtcagtataaatattgacacgtagtccctttgcaagagtgagggcctgagttaaggcaatgagttcagcttgctgagaggtagtggagcggggcagagcagtagcctcagtgatagatgtggaagatactacagcatagcctgcctttgctggtgagtggtgattaggcctggtggaactgccatcaataaaccaagtgtgatcagggtaaggaacaggaaagaaggaaatatggggaaatggagtggatgtcaggtggatcagagagatacagtcatgggggtgggggccagcctaaaacagtaaggtcaagttgtttgaacagaaaggctacagggcgtggtcctggctcttgtgtaagaattttgactgcgcagccctgcacttcggctgtgtgtaatgaaaagggttgggatgagttagggagagctagtgtgggagcagtttctagggctgtttttaaggaatggcaagaggagtggctaaaggatttaggatctttggggtcagctagctttgcttttgtgagtttatataatggtttagtcaggatggtaaaacttagtatccaaaggcggaagtacttaaccatacctaggaagaaaaggagttgttttgtagaaggggttggggtttgggagatgagccagacacaatcagcagggagagcacatgtgttttcatgaagaattatgccgagataggtaatggatgaggaagaaatttgggcttgactgaagtaatgggggctgtcctcgaagccttgtggcagtacagcccaagtaagttgctgaggctgacgggtgtcagggtcagtccaagtgaaagcgaagagaggctgggatgaagggtgcaaaggaatagtaaagaaagcatgtttgagatccagaacagaataatgggttgtggagggaggtattgaggataggagagtatatggctttggtaccatggggtgaataggcaagacaatttggttaatgaggcacagatcctgaactaacctgtaaggcttgtccggtttttggacaggtaaaatgggggaattgtaaggagagtttataggcttcaaaaggccacgctgtaacaggtgagtgataacaggctttaatccttttaaagcatgctgtgggatgggatattggcattgagcggggtaagtgtgattaggttttaatgggatggtaaggggtgcacgataggttgccaaggagggagcagaggtgtcctatacttgtggattaaggtggggacacacaaggggaggatgtgaaggaggctttgaactggggaaagggtggcattgaggtgtggctgtggcctaagaacagtcagggaagcggataattgagttaaaatgcctcgacctagtaagggagctgggcaggtggtgataactaaaaaggagtgcataaaagaatgttgtccaagttggcaccagagttggggagttttaagaggtttagaagcctggcggtcaatacctacaacagttatggaggcaagggaaacaggcccttgaaaagaacgtaatgtggagtgggtagcctctgtattaattaagaaggggatggatttaccctccactgtaagagttacctaaagcatctgtgatggtccaggaggcttctaaggtgatcgggcagcgtcagtcttcagccgctaagccaagaagatctgggaagcagtcagtcagagagccttgggccagagttccaggggctctgggagtggcagccaggccagttagacagtccgatttctagtggggtcccacacagatgagacacagcttaggaggaatcccaggctgcgggcattccttggcccattggccagatttctggcacttgaaacaagatcctgatggaggaggtcctgtaggaatgcttgaccactgcagtttaggcattttgaagtttttgtgtgtgctggagatgtggctgggttttgtctcacagcagaggcaaggaatcgcaactcagaaatacattgctacttggctgcctctattattgtacatcttgaaggcgaggttaattaagtcctcttgtggggtttgagggctggaatctaatttttggagtttttttttgtttgttttttggttttttttttttaatgtcaggagctgactgggtgataaaatgcatattgagaataagaggccttctgacccttctgggtctagggctgtaaagcgtctcagggttgctgccaaacgggccatgaactgggctgggtttttcatatttgatgaaaaagagcctaaacgctaactgatttgggagaggtcggataaataaaaaggaacattaatcttgactatgcctttagctccaaccacctctttaagaggaaattgttgggcaggtgggggagggctagtcgtggaatgaaactgtaagctggaccgggtgtgaggaggggaggtgatagaaggattatagggtggaggagcagaggctgaggaagaattgggatctggcttggcctggcaaggagcagcctggggaggaggggagaggtcagatgggtccatagaaaaggaggattggaaagactcagcaacacttggggttgggattgagaggacagatgggttgggattgaggggacagatgggagggaaagaaggaagatttgggacaagttgcattgggaacagagactagggagggaccaatgtgtaaaagaatgcctggacgtcaggcacctcagaccgtttgcccattttatgacaagaattatctagatcttgtaggatggaaaaatcgaaagtgccgttttctggctatttggaaccattgtcgagtttgtattggggttaagcagcattgcagaagaaaataaggcatttaggttttaggtcaggtgtgagttgaagaggttttaagttcttgagaacataggctaagggagaagaaggaggaatggagggtggaaagttgcctatagtgaaggaggcaagcccagagaaaagagagggtagagacatggagagaaggggtgggggggtgcttgcccccaggaaagtggttcttgccactaagggtgaaggatcaaggcaggcattcgcgcggtgatcagatacctctgaaacgtgggtgaataatcaagcaggtgtccctgcagtgattaaacagcaaggaaagactatcttcccaagtccatgaccagtgccagagttttgggttcatggataaaacgcgtctcctctgtctctaccagaaaatgaaaggaattgaaattaagagaagggagagattgaaggatggcgccaagattgaaaggaaaaagaggttgagggatagggagagaggttggataagagagtaaaaagaggctgcttacccaatttaaaatcggtgagatgttccttgggcttgttggtctgaggaccagaggtcatgggtggatctttctcatggagcaaagagcagggggacaggggattgatttcccaagggaggtcccctgatctgagtcacagcaccaaatatcacgtgtgtccatgcgaagagaccaccaaacaggctttgtgtgagcaagaaagctttttaatcacctgggtgcaggcgggctgagtccaaaaagagagtcagtgaagggagataggggtggggacgttttataggatttgggtaggtagtggaaaattacagtcaaagggggttgttctctggcgggcaggggtggggggtcacaaggtgctcagtgggggagcttctgagccaggagaaggaatttcacaaggtaacgtcatcagttaaggcaggaaccggccattttcacttcttttgtcattcttcagttacttcaggccatctggatgtatgcatgtaggcttgggcccagaggcctgacatttaacatggataaatgtaaagttcttagaatcatacatacactttggaaaagatggggcttaatcgcactttataagacttgaaggatgtttgagaatcactatgaaactgctgaaaataccaagaaaatttaattcttatgtatataaataatgtgtctgttttacatgaatcccttctacaagcttggtatttaatatggcatatattgttttttcatagtagatttaaaatttttgatatctaatttagataacataaaattaaccctttgaaagtgtacaactccgtggtttttagtatatccacctgattgcacaacgatcaccactgtctagttccagaacatttttatcaccacaaaagaaaggctgtatccaggccgggcacggtggctcacgcctgtaatcccagcactttgggaggccgaggcgggcggatcacggggtcaggagattgaaaccatcctgggtaacacggtgaagccctatctgtactaaagatacaaaaaaattagctgggcatgatggcagatgcctgtagtcccagctactcaggaggctgaggcaggagaatggcctgaacccaggaagcggagcttgcagtgagccaagattgcgccactgcactccagcctgggcgacagagcaagactccatctcacaaaaaaataataaaaataaaataaaaaaaaaaaagaaaggctgtctttctcctttcccattggccgtctttctccattccctactcctccaatcccctggcaaccactaaatctactttccatgtctgtggacttgactcttcgggacattttacataaatggaatcatgcaatgcagcacattttgcatctggcttttttcacctggcgtgttttcaaggctcattcgtattctagcatatatcaatactttgttcctatttaggactaaataagattctattgtatgaataaaacatattttgtttatatacttagtttgatgaacatttgagttgtttctggatttttttttttttttttttgcctcttatgaataatgctgctatggacaacagtttttgggtaggcatgcattttaaattctcttatgtatatacttaggattaaaattgctggatcacagagtaactccatgtttaactttttgatgaattgccaaactgtttttgagagcagctacacaatgttacattcttaccagcaacaattgagggcttcagtctctctacaaccttaacaacacttgttattgtctttgtaattattgcctttctaggcagtgtgaagtggtgtctcactgtggttttgatatgcatttccctaatgactaacaatgttgtgtatcttttcgtgtgctcattttcaatttgaatacattctttgggaaaatctctgtttaaatcttttggccattaaaaataattgggttattttcattgttgagttgtatgaactctttatatactctggatactacactcttatgacatatattattttcaaaaattttctgtgcatctgcaggtcatcttttcactttactgatggtgttctttgaagcaccaaagtttttaaacttgatgaaatccagtctggctttattcttgcacgtgctttacctaaaacgccaaaacctaattcatggttttgaagatttttgcttatgatttgttcttagaggtttatagttttagctcttacatttaggcatttgatgcattttaaattaaattttgtatatggtgtaaagtagcaatccaacttaattcttgcatgtgggtattcagttattccattgtcttgaaacccttttcaaaatcaattgtctataaatgtaagagtttatttttggaccatcagttctatcctgttgacctatatatgcctatcctaatgccagttacacacagtcttgattaccataactttgcagtaagttttgaactcagacagtctgagtgcttttattttgtcctttttcaagattaatttggttattccggatcttttgcatttccatatgaattttaggatggttgtcaatttctgcaatagaaaagcagcaggattttgatagagagtgcattgaatctgtagaccaatgagtatcaatggaattatgtgttatcaaatttagtaaactacataaacgatatgtacacaactaaaacaaaactaagatataagatcatattaatgtaatgataataaaagtggattgtctcctgttctaattttaataggcacaaggcatttttgttaatcacttcttattaaagaattttttataatattcaggaaaatacaacaaaaaaacccttacattcctaaggcctcagagtcagagtaatataaaggaaatgtaaacacatgctgagtaatgcaagcatttggcaatggtggtgactggagctgggagcacagcttttatttctctgaaataggaatttgccccttagagttagaccaattttgccttcctctaaatggcaaacagtttggagatactttaaaggacattttttcacttaggatgtttagtactatgaataataaatagtcacaatttccttaactatggtgacaaaatacaagcaaatttagcctcatgtcatttcctaaggaacatcttctctctgtgagttcacaggttgccacatgaacatcttccagcatcttgcgttctcagatgtggatgttgccagggttctcactccagatgcttttgtgtgtcggaccatctgcacctatcaccccaactgcctcttctttacattctatacaaatgtatggaaaatcgagtcacaaaggcgagtatgcatggaaaatcgcatcacaaaggcgagtatgcatggggagcacttgctgctgtactttcatcacttttatagtctgagttcttaaaagtttcgttcatttccctcaaaacacttgaacctgcagtttcagtaggtactgttctgccaggtgcagattagttaagagattagcagacttctctgcctatcttctcttactttaaaacaaatgttaccattgaatcaaggaagcaatagccatgagaaaaaagaaggatctgacgcctttgaatgaagattcaaaacatgatcttcatgttttgtattagcttggagtaaaatccacttgctggcaatatagcccttaagcttgttgcctcttctctttgtttcagaaactagagccctgtttattctgatcaaggctctggcccactgtctttatctcagataacccaccctcttctgcacacagcatggagctaagagaagggtgtctagttatgtaatatcatcggcagcataaattcccagaatttgttctttgatttttttgtttgtttttccagttagaaggtggaacttcatcattgtcctcttttcaggttgtctgtgcctattagttttctccagagggagaggtggcttgatttacatttaatctctgcaatttattagagtcctgtagttggatttactttgaagagagtttcccagaagaataaaatttgctgcgttgctttttgggtgtgagctgcttttgtatttgcctaatgcctttaatgcaaatttctttctttctctcttgcttttttttaaaaaaaatagaaatgtttgtcttcttaaaacatctgaaagtggcacaccaagttcctctactcctcaagaaaacaccatatctggatatagccttttaacctgcaaaagaactttacctggtaatgtgatttgataataatattacataaaatgtaacctatttcatgacttttaacagcaacagtgatgaaacaatcctcaaggtaacagaaacttgtgtaaatgtcgttcattgcttttcccatctgatatctttttgtgtttataattgacacagaaccctgccattctaaaatttacccgggagttgactttggaggagaagaattgaatgtgacttttgttaaaggagtgaatgtttgccaagagacttgcacaaagatgattcgctgtcagtttttcacttattctttactcccagaagactgtaaggaagagaagtaaaggaaattttatttttcaaagacagttgacatgaccatttcatattctctttccccctgtgaaggcttactctttctactgttcatttcatctaggtgtaagtgtttcttaagattatctatggatggttctccaactaggattgcgtatgggacacaagggagctctggttactctttgagattgtgtaacactggggacaactctggtgagtaacctcactttttcgtggacctgtcagggatgtctgtcatgttgatagtttgcttagtcttaaggaattatgtgtcttgttctccttggttagaagggactttgattcacttctaattccaaccattagcgtcaacgctctcttttcagtctgcacaacaaaaacaagcacacgcattgttggaggaacaaactcttcttggggagagtggccctggcaggtgagcctgcaggtgaagctgacagctcagaggcacctgtgtggagggtcactcataggacaccagtgggtcctcactgctgcccactgctttgatgggtaagtgttggatgcatctcatccagagtcttatcttggcttttcattttgaaggatctatgatcagctgcttcaccgccatgtgactttatgaatagagacgtgttaaagcggggatggtattcacaacatttaacttatagggtccaagcactgaccaacctgaccattagaacagagtgtggtctctgtacagggcagatggcgctgagtgggtattctccacagaaagagaaacgaagacagtaccccactcctccaacccaccacccaccaccaatcccaccaccaattccaccaccaatcctgccacccaccaccaatctcaccaccaatcccaccaccaatcctaccacccaccatcaatctcagcaccaatcccaccaccaatcccaccaccaatcccaccacctaccccaccaccaatcccgccacccacgaccaatcccaccaccgatcccgccaccaatcccaccaccaatcccaccacctaccccaccaccaatcccgccacccacgaccaatcccaccaccgatcccgccaccaaccaccaatcccaccaccaatcccaccaccaatccctgatgtgttcttcaaagacttatttgtcaggcccatagaaatgttacttcttgctctttgattcataaatatactaagtcataataatttttaaaagtgagagtttcgtactctgtatatttcaatgtatataatttgatctatttcaatttattggtcaaatagtagacatgttaggtaagtcttaaaatactgaggctttggagttagacagaacatggcttaagtgacagctttgctgcttattagaggtgtggccctagaagatttgtaaatccctctgagctttatttgatctaaaatatgaatagtaatagtcccgaatttgtaacgttgttgggaagattaagtgacacatttaaaatgcttagtactgtgtgtagaacataaacacttcaaaaaatgtaaactgtgatttctatattcaataagaaatgtagaaatggacaaagcatataaaaagcaaaagaaatactagaagacacttgatttttctcaaaaataaacacaccaagtatttttgttttagtgaaattcatgcttacatgctgtatactaggattgaacatactgccaccaaaatatagcagtcggtggtacatgtgggtggagcaagacccctccaccttgtcatcgtgtgaaggggctctgccatacatgaccttgcatgtgactttaaggtggttggcctggaagaaaagtcccaagatgggaaatagtaggtgtcttttttactaaatgcactccaatttgggaccaaaaattttcattcttgaaggctcagtattgtgagtttataagagataatagacataaaagtgtaatgatttcattgcaaataaaaaaaggcccctttgcacctgatatctccatcatttttctagaattttgtgcacacatgccttgcactacttggtgatgataaagatttccagatctttgcacagaataaggctttgctttagatcagaattttggatgtacttagtatacattcatcttttaaataatctatttacattttcatactttccaaaatacagatatattttattttatttatatatttatttaatttattttttgagatggagtctctctctgttgcccagagtagagtgcagtggcacaatcttggttcactgcagcctctgcctcccgggttcaagcgattctcctgcctcagcctcctgagtagctgggattacaggcgcgcgccacacctggctaatttttgtatttttagtagagacgaggtttcatcatgttggtcaggctggtctcgaactcctggcctcaagggatccacccacctcggcctcccgaagtgctgggattacaggtgtgggccactgtgcccagctgtatagagatattttaaacaacactaaagtcctcctactttgactaattagaagagcattagaagatcagcctgacttcttgacagttctgaatttagtggagcaatgaggttcagctttggtgaatgagcttaatttttccatgataaactgctagtttcttcccactacagtgtctctcaaaaatgggacagcaacattctttttgttttcacttgcagtaagcatgatgcaattacataaatgtacacttttcaatttgttaaatagaatcttcagagattcactactgccgctattggtgatgaaaaattaccagaaggaggaattaggtaggagaaaatgtgtcctatgtatttccttcccagttctttgaaagagagtgataggaaaaaggaacactattgaaggaaggactgcccagtttcaaacaggtatttatttttctctcctaggcttcccctgcaggatgtttggcgcatctatagtggcattttaaatctgtcagacattacaaaagatacacctttctcacaaataaaagagattattattcaccaaaactataaagtctcagaagggaatcatgatatcgccttgataaaactccaggctcctttgaattacactggtatgtagcatatgtaagaaggtggagagcagaattgcgctggttgatattttcatatcagtttgaacaagagggcagacctagagagactgtcgtcgttttctgactggtggagttgagggaaacgtgagggttgctgggaagtgaagaccccgcgacttgccgtgaaatctcttctacttaaagagcaagacatgtgaattaattctttcagggagggatacaactgcatgcaggtgatggaaataatgggcgtgggaaatgtctgtgccgtctgagaggcactgggcttgctttgacaagagtagcagaactgtcattgctttgggcttagggatattcgaatgtgtgagggcaagtgggatcagatatctacttccaggtataatttgggtaggaaagagactcatgcagaaagaagccctggaaggccagagcatcgtggtcagaggtgttgcctttggagggtcattgctgccaggagccgaatacccactgtatccaataacattcatggtcaggaatggtggctcacacctgtaatcccaacactttgggatgcccaggtgggaggattgcttgaggccaggagtttgagaccagcctgggcaacacagtgagaccccgtctctacataaaattagaaaaaaacaattaactgggtgtggtggtgtgcacctgtagtcccagctagtcaagaggctgagacaagaggatctcttgagcccaggagctcaaggctgtagtgagccaagatcgtgccactgcacacaaacaattatgtgacctcgggcaagttgctttacctctttacacctcttaatttccttatctgtaaaatgaggatgataatttcttcctgggtctgttgtaataattaatacatcaaagcacttcatgtctggaacagtgaagataccctgctatgactattaaggatagtatacatggaataagacacaggaacttctaaatgcttttgaccatagatttaggttctgagttttaagaatttaactcaggaaattgtaacaccaaaaatgtcatgtgaaaaatggtggtgacaaattttcttgaatcattagccttagaggttgggcagaaagcaaaaaattattcttgatgctactctatagaaagagaagacagaaaaagagaaagatgtatttttaaagtctatatccataactttatttgaccaaactctaatttaaaaattatgtttcagaattccaaaaaccaatatgcctaccttccaaaggtgacacaagcacaatttataccaactgttgggtaaccggatggggcttctcgaaggagaaaggtaagcatgacgctttaaatattgcttctagagtaagtctcacatgttgaaatacatggagtgggtcgttttaatcggtttctgtctgaaattatatctaaactctttatctttcctatctatttattcccaaatatttattcagttattcttaaaaaatgtatttttgctttggcttgaaaaaaaattttagggagacttttaagcatcttacttcattataaagatcagttgcttgactttgcatgaagcagattgggcccttctagggctgacaagcccgtgcaagaccacccgctcctcagtgttagtagcgttcccgtctcccaaaaccatgttctcccttgatgctaatggccgggagcacaggcaggtgtgtcgtctcactatggagaataatatttgtgtcattctttacagaagaaggtagcttgccaaactgtctccatctttcccgattcagtcttttgttcaagtaattcacatttttagattttttattggtaatctgagacaagaagaaatttaaagtaatcttcactaagccatgaaagctcccaacattgttctccatgagagatgctggcctgcatttattcaaaaacaaaagacccctctgttgccaaagctcggagggcttttcagaaacgatatagttgtaaattataattttgaatatataaagcaaaaaaatgaaaagtgagaacttccaggctttggattgttgtaggtgataaatataaaatgggatttctggggggctgctactgagatgaggggatggcagaaaacatggaagcaaggtctctggtcagcccagggtgctgggcttgtcccaacaccacgtaggcaataagaggacagtacagggtgccgtctctctccctcttcctctctctgtctctctctctctgtgtgtgtgtgtgtgtgtgtgtgtaacactaccttcccaatttttactgtctatttgtattcaaagataaggtccttatgaaaaatacactgctctgattcactttaaaacttatttccatatttattatttattgtgggaataataatattcccaatattattatttattatttaagttattattattaacttccctctgaggttatatattggttactcacaggtgaaatccaaaatattctacaaaaggtaaatattcctttggtaacaaatgaagaatgccagaaaagatatcaagattataaaataacccaacggatggtctgtgctggctataaagaagggggaaaagatgcttgtaaggtaactcatgagattatgaaaaacacaataggctgcttgagaaaattcatttcaaaatatattttccaatagcataattcaatcatagtttttaaaaaaattcagagacaaatgatctgataaattgataagcaacttttaacaaattgaatatacataatatatatttatattatttatgatatatgtcacaatctatgcatgtgctatttaagaggggcaaatatacatgcaataattgtgctagaatataaaaacattagacttcatcattgggatgatgatatcaagatttctttgttagatttatttcagatagaaaaggggatacgaaaaatgcaggcacatgagatacttggagaactttaagaaagagtgagtgtgtgtgtgtgtgtgtgtgtgtgtgtgtgtgtgtctggcaagcaaggtcttgcacacacacagcactttgggaggccaatgcaggtggatcacttgagcctaggaatttgagaccagtctgggcaatgtgatgaaacccatctctacaaaaaaatatgaaagtatctgtgtgtgtgtgttgctgtgtagtggactacagaactttagaggcagtcacttatttgaatcccattgtcgtaactttctactattttatttttccactgtgactcagggagattcaggtggtcccttagtttgcaaacacaatggaatgtggcgtttggtgggcatcaccagctggggtgaaggctgtgcccgcagggagcaacctggtgtctacaccaaagtcgctgagtacatggactggattttagagaaaacacagagcagtgatggaaaagctcagatgcagtcaccagcatgagaagcagtccagagtctaggcaatttttacaacctgagttcaagtcaaattctgagcctggggggtcctcatctgcaaagcatggagagtggcatcttctttgcatcctaaggacgaaaaacacagtgcactcagagctgctgaggacaatgtctggctgaagcccgctttcagcacgccgtaaccaggggctgacaatgcgaggtcgcaactgagatctccatgactgtgtgttgtgaaataaaatggtgaaagatcacgattagcaagtgttttcttctggttgtgaaacagaactgaaagtaagtggttgaggttccagcacagttcctgggatccctctaattgcactgcttcctctggaactcagtatatctcaaagatgtaatttcctctccgtgctgcacctggtcggccactgaaacccactattgcctgcttcacgtgtggcaaagagctagcgggcttgggttttgttctgccgagaggaagggagaacacccacttttataagaaagagatgggttacctgaacccatgggcacctttgcctcttggcctcctaactttgctaccagggcatggctaggagggtccaggctgcgcgtgctgaggagctcgaggggctgcagcattgcacagccttcatggcaggcaaggaatctgctttgcaaggggcattagccctggaggctcagtggatatgggctattgcaatagtaattcaaggagcatttttaggcctggcgtggtggctcacgcctgtaattccaacagtttaggagatcaaggcaggtggatcacttgagcataggagttcgagactagcctggccaatgtgacgaaaccccatctccacaaaaattagctgggcatggtggtgcgcacctgtaatcccagctcccccagaagctgaggcaggaggaccgcttgagcccggggatgtcgtggctgcagtgagctgagatggcaccactgcatcactgcattccagcctgggcaacagagtgagactgtctcaaaaaaaggaagcattgttaggtataaattattattattattattattagtagtagtagtagtagtagtagtactgagacggagtcttgctctgttgcccaggctggagtgcagtggtgcaatcttggctcactgcaatctctgcctcccgggttcacgccattctcctgcctcagcctccggagtagctgggactacaggcacccgccactgtgcttggctaattttttgtatttttagtagagacgggtttcaccatgttagccagaatggtctcgatctgctgaccttgtgatccacccgcctcggcctcccaaagtgctgggattacaggcttgagccaccacacccagccctgttaggtataaattatttcataaaattcagacttgtaaatttatggtagcctttggaatgggtgatagatgtcctatgccacacaaattcctcacatgccgaggctcaccgtaactgataccagctcgcttgattcagttcagttaaactgaacaacatttacacagaattggcgatttacaaaatcttatgtaagttaagtagaaaaacagaaaaaagttttctgaaagagtttgggtttttccttcaatgctcaagacagaggtccccaacctttttggcaccagggaccagttttgtggaagacagtttttccatggaccagcatggtggtgggggatgattctggaatgattcaagtgcatgacatttattatgcactttatttctattattactacattgtaatatataatgaaataattatgcaactcaccataatgtagaatcagtgggagctctgagcttgttttcctgcaactagacagtcccatctgagggtgatgggagacagtgacagatcatcaggcattagattctcataaggagcctagatccctcacatgtgcagttcataacagggtttgagctcctatgagagtctcatgctgctgcggatctggcaggaggcagagctcaggcggttatgcttgctggcctgccactcacctcctgctgtgcggcctggctgctaacaggccatggaccaggtactgttctgggccccgggggttgggaacccctgctcagagacacaccgggtggtaggaggagctaaaggtggagagggtgaaggaaaatatgaggtctgggctatccacaaaccagatagcaggaaactgaagagttaaacatttacttcagaattgaatggcttttgtaaaatctggctagattccatgaaacgattttaaaaatgcactatttaaattttgcctttgcatgcgatgaagacattagtctttgttcatgtggatgtttttttatgtttaaaagggaaaaaatggtttgcaatgaaacttttatctcagtctttgagtattgatcatggggtgttggaacaggactttggaatgcttgcagggtaaacctttggcctctgttagtcagggaatgacctagtttggcaaaacagaggagagttttgaaatatggaactttcccgaggcatacattgtcattttaaagtggtcaatcaaagcccagtaggactgggctggtgtcttggtgactcactgtgtgctcatatacaggggtaactgaggagcccttcacacaggtctagcctcgtgggactaaaaagtgtgacatgggctaggaaaatgcgaggctgggatgccttcactcccatgaggaagcgtgacgggaggaggcgtgggccactggcagttctacttcacaaaggctgctggcagtgtcaatcctgcaagctggccttgccctcctgtggcggcagtgtacacgtggcatgcaagcacatgcacaagccacctggctccaaggtcagccaagggctccaacatctgtctcagtccctgccaaggcatgggaaccccccacgtaaacttggaacttttcctttcaattgttgcttatgtctgtcactttacttgactgtgagcagcttctagggaggctctctcattcatagtgcatatcatgggcatccagtaaacggctaatgatgatgatacacctttattacaaaaataaaggcaatggagactgaagaggtgaaatgattagctcaaggtcactggcaaggacagagctggaacaaagctcagcattcctatgccaggcaatgtcctctcactgatatccggttgcttctcactaggagaaggatgaaagatgacagagcatttataaccaccatttgttattttcattatcaactgacactggtgtttctctgcccggagcgattttgtcctcccttcacctcaggaaacattcggcaacgtctagagacacttttggttgtcctaatgggagagggtatgcaactggctgtagtgggtagaggccagggatgcagctaaacatcctgcagtgtgtgggacagcccctcgcaagagagagttatcctgccccaatatcaataatgccagggttgggaaagcctgatctcatgtcagcattaaaaccttgtaatgaaaagaggacatttcggccgggcgcggtggctcacgcctggaatcccagcactttgggaggctgaggtgggcggatcgcgagatcaggagatcgagactatcctggctaacacggtgaaaccccgtctctacttaaaatacaaaaaaaaaaaattagccgggcgtggtggcaggcacctgcagtcccagctactcgggaggttgaggcaggagaatggcgtgaacccgggaggtggagcttgcagtgagccgagatcacaccactgcactccagcctgggcgacagagcgagactccgtctcaaaaaaaaaaaaaaaaaaaaagaaaaagaaaaacaaaagaggacatttcaggaacagcaagaaaggggttgtaggacatggcgggctgtgccctttctcttcctttattttttactttttgatacattctatttgtacatatttgtggggcacatgtgaaattgtgttatgtgcatagaatgtgtaatgatcaagtcaggatgttggcatacccatcacccaaccatttctatgtgttgagtacatttcaagtccttttctagctatttagaaaactataataccttgttgttgactgcagtcaccctactcttctgtcaaacattagaaagcattccttctatctaactctgtggttgtaccccttcaccaacctctcttcgtcctcaccaccacccccccacacacacccttcccagcctctcgtaaccaccatatactctctacggccatgaaatcatctttcgtgggatcatgcaatgtttgtctttctgtgcttggcttactttacttaacataatgacctccagttccatccacattgctgcaaatggaatgatttccttcttttttattgtgtccattttcaaagcaagttctgaaagacaagagaaggagctctgagagttgattatggccatgcctgagaaggggtctcagtcaactaatgccgttgtggacattcctgtcccaagcagaaggctttaggtcacaatatgtccaaatgtccaatacatctcccacctatgatccattggaaagaaaacaaacctcgggacccccaaaatcactaagccacatggaaaagtaaagctgggaactgcattgggcaaaccttcctcccattctattcctaaataaaatagctttcttaagctataaaaaaccttttttaagctttaaaaaggttttaaaaagctacattcctcacaatttgcccatgaggaaattccttgtggaaaaaggacaggcagaagtcagagtcacccctctgctgacatgagacaggtgcgtatctgattgcctcgtttgccatattgtttcactgggccacactaaggcatgagtgactattcttgtaaattgcgtatttggtgaaaggctaattggaaactcgaaaaaatgcttctgtttgtctcttatctacctatgacctggaagcccccttcccttcttcgagttgtcccaccttttaggaccaaaccaatgtacatcttgcatagattgattgatgtcttatatctccctaaaatgtacaaaatcagcttgggccctgaccaccttggacacatgtcatcaggacctcatgaggctgtgtcataggtacatccttatccttggcaaaataaactttctaaattgattgggacctgtctcagatactttttgatttagaatcctaacttctgacttgtacttgggtctctgcagactaacttctatattcttcctaagactttgtctagttattcctcattttcatcagtcttcgaatattcaaaaacatttcatttcattgaaaaaaaattgaaaaaagtagttgatatcagaattttaaactgcaatgcattagttgaaaataattttttaaggatatctatggtcagtttaaaagaaaggtctatttaatctcaaagagtttctatgtagtcaagacttttattctaggctgggcacggtggctcatgcctgtaattccagcacttgggaggccaaggcaggtggatcgcttgtgcccaggcattccagaccagcttggggaacacagcaaaaccctgtctctacaaaaaatacaacaattagccatgcggagtgacatgcggctgtattcctagctattcaggaggctgaggtgggaggatcacctggtggctgcgttgagtggagatcacaccactgtactctcgtctgggcgacaggagtgagaccttgtctgaaaaaaaattattctacttttatttgaatagacaaaatttttttgaatcctgatactatttcaaagaccttaaagatttcactaactagctaaatcaaacttaggaaaatattatttggttttccagtgaagcatttctcttatttagagcctttctgtttctctcaatagggttggagagttatccttatcttctttttattggggcttaagaagagagatgaggttccatggagtaaacaatacaaggatataaggacctcatataatctcacgtatccattttccatgaaagccattcttggcacgaatttgccattctatgtttgagcctcataaaaggcaatgcatcataaatatgcactttttgggtagctggaatgtactttaaacgggaaactcaagaaaacagctaggaactctttatgccaggataagtcaaatgcactggcaatagatcaaataaaaatatctgagtaaatgccttccagatagaacatcaccctagttcttcagcactttacaaaaagatctgttctcagttcacattctcttaattccctgtcatttctccccggtcttccaaatatgttttttaaattatgattccatgtataaacacaagatcgtattttgcttttctatgaaaaattgagagccttctctgaaccataaacgtatctttctccaaaatgtattcaaatcaggcatattgaaaactgttttgtgttcgtgttgtgaggttttttaggggaccgcacagaaaccctcagcactagttagtgccttgtgttctaaatgaggaaacggaagccaaggacctgcaggtggctggggactgtgcacaggctggttccgctcaagtcacatgactcgtcagccagtgagtaggtctgggtagcagttggcatggatgaacatgccctccataggctttcagaccttcttcaaggccaaagggaaggccttcatggaaatataattatgtgaaacaccccagaattttttcacaaactttcctgcctataaacgccaggtcctaccactgtccagtgtcccacttcccactgtccagtgggaagactccctccaggacaaaaccaccctttccttcagggatgtgacgtgctgtgctttcgttgacagtcatgcagctgctagacatgtcacttcctagctctccattcgggtctgtgtcccaggacctaaagaaagctaaaagaagccgggcgtggtggctcatgcctgtcatcccagcattttgggaggctgaggctggcggatcactggagatcaggagtttgagaccagtctgaccagcatggtgaaaccctgtctctactaaaaatacaaaaaaagaaaagaaaaaagaaaaaaaaataagctgggcgtggtggcgcgggcctgtagtcccagctactccggaggcggaggcaggacaatcacttgaacctggaaggcggaggttgcagtgagctgagatcgcgtcattgcactccagcctgtgcgacgagagactctgtctcaaaagaaagaaagaaagagagaaagaaagaaagaaagaaaagaaagaaagaaagaagaaagaaagaaaagaaagaaagtaagaagcaagcaagctgaaatagcttatttttctgttttaaaaaatagacttttagtgttcacaagtaagaataaaaaaaaaaaaagcttggccttaggaggaatcctatctgcttaggcctctgagaggcagcgtcacctgaagggaaactgactgggcaagagccaggctcttaggagctgtctgtactttgcttcccatccgtccgctctcccccagcagccaaagtctcctccctccattatattgcaaatcaatgaatccattagactttccatgttttctttttagactttgagattcaaggtcagctagaattaatggttaacagctgacaggtgaaagtgtggttaaatgcagctttggctagcaggcacacaggcaaaatcaagttctacatctgtccctgtgtatgtcacttgtttgaatacgaaataaaattaaaaaaataaattcagtgtattgagaaagcaagcaattctctcaaggtatatttctgacatactaagattttaacgactttcacaaatatgctgtactgagagagaatgttacataacattgagaactagtacaagtaaatattaaagtgaagtgaccatttcctacacaagctcattcagaggaggatgaagaccattttggaggaagaaaagcacccttattaagaattgcagcaagtaagccaacaaggtcttttcaggtacagtttcagaacttactatttaacattcctctcaagcaaatacgccttgaaatgctttttttaaatcataggaatttaaaaacactttacaatagagaatgattgatttttaaaatgtgtctgatttagctttgtagagatgttccgctaatatccataactaatctgagaggaaatgtggaacaacagaagagtaacagtgtctactcagtaacaagcgttttacgagttaaaaagacatccaaatgcagtactgaaaaatcagaagtcttgatttgtctcactgatgactccgtttttcctagagcagtctgtttaatgcttactggagataaatagatttataggtgaccaagacaatcgattaatgtatcagccacagacttttttaaatagaaaattttctaagtaggaaatcattcatagctctttgaaagatatagggagaggcctcaaggaaagaaagaaaggaaaaaaattgggaaaggaaacaaagatgaaaaattggggtggggagagcggtcagatggtggccatgagaaggatctgaacacagagagcggcggggccggcggggaaggagggaggaggggagagcgctgcttccctgtgggttccggcttctgcagagctgtaagagttgaatgccacacacagtcacactaaggaatgctccaggattgggaaagaaaattcaacattataatgagaacactgtgaatgctattgaattaactactcccctctctccctatttcttgtaagtcttagtgtcagtaaactaattataaatttacattttatgttctaaaagcatgcacctttttctcattgtaggatgattttcttatatcaagtggtacatttcattttatttacttcagtttctggtggtaagtagagtgttatcttaactatgggctgggagagggaaatcacactgcaatctccacacatgtgggagaatcccacaccatttatgccgggaaggaaataaaatgtttttattaacttcctgcctgaggctccagaggttttcaaagcagggtaggaattgaggtgaaaaaattgtttgtactggtaggaatctgtgtctatatgtgtaccatatctacatccatgcctacatacatcattcatttaaatgatatttaaaagcaatattaaaaagaagaaatcttgatttgcctcactaattagttggtttttcataaagcagtcagttcaatggaacatacacacacacataaaataggaattttgtactgaaaaatgttatgtaactattcatacacagtttatgcatttcaataatttaactaccctgttaattctccaccctatgtcacatctgctaaatttgtttataaattacttagccaatattaagtaggatatatcagtacaggtattgtttagttccatgaccattctttatttaaaatgaaagctgaagcattcctttagaaaaatagcttatgtctacatgttatatttaatttctgatactattgctagcattttaagcatagtaaattctttttgctggcctatgtgaaaaaaggcaaacctaggtgaagatattaaaagtaaattccacttaatatattaaattacacagctcataatttcaattttctctgtgacaagactactgctcaggttataatattcctttgttataattatctggaaattgtattgttatttcattgataaatatgtcagcgctaaataatttgatatattttgaacactggacccaataactacataaacaattgaccctgaatcaggggttccacatccatggatttaaacaacattgaagtgaaattttttaaaaaaaattatatctgcactcaacatgtgcagagttttttcttgtcattattcccgaaacaacacagtataacaacaatttgcatagtatttacattgtactaggtattataagtaatctagagatgatttaaagtacacaggaggctgtgagtaggttatatgtaaatactatgccattttctatcagggacttgagcgttcatggattttggtatctgcaggaggtctggcagccaatccctcatagatatcaaggaatgatagtgtacatatttaggtcctttatacatgcacatggaacatttacaaatattgaccacacacaagc

SEQ ID NO: 353 - DNA, 95188 bp, Homo sapiens
aaccgcccggaaatccagcttttggaacgtggggcgaggcgggagggacctgcccagcaatatggagccggctggggagagccagggagcctgcaacccggagctaaaatatcgtgggcaattctctggaaaccacagctctaacctaagctcagaaactgcccctcagatcacaagacaaagagaacagaaaacctctggccaggcactcctgtacagaaatacactttgataaccagaattggagcctgaaatgcaaggatatatgcagaatggctgttacgtgttgaatgcagaatgtgtgtcaactgggtttgggggaattcttctgtttcccggggcgctattaatatcggaaaggtctcacttccaccgttaatcccttgagctgcagcgctgttggtgtccgagtgtgagtctgctctttatttgggggcttcatgattttaggttttttttcttttttctcttcttttcctctttgtcagccagtgcgaagtaccaatggataaagcagttccgggttttgaatgcaacataagattgtcattttggtgtgatgaggctcaagttttagtaatcaggagggatattcacagagcttattggtcaaggcttgatgtggagttatattttaatgcttcattagttctgttacgttttggcaaccttaaagatggttagatattagctaggaagggttggagtgggcagacaggttcatttcttaagcaggttattagaatattagattgtcacagtttgaattactaggaatttggtgacttctgcacagaaggccacaagtatcttttaacattgaaaaaggaagaaaaagcaactcactagctatacaactttttgacagattacactgttcttgaaaaaccgtttagaagaaagcagataagagttttcttaggtgcaaaagttgattaaactttaggaagcaagtgtttttgaccagtataaagaaaataagagtaatgtgtgggggtgtgtgtgtgtgtgtgtgtgtgtgcgcgcgcgtgcctgcggctaaagtttgggaagaaatgttggttcagagttaaggtttaagttggaaaggccagtggaggaggctccctgccttgcagaactgctgggtattgtcactgcttgcctcttcagcttttatatgcaggtaggtactagataatcatattactttttccagagaagtggatagatttttatgattgggagaaagtttaatgtatctgatactggcttgcaaagtgtaatgtgcatttacttttaactttcatcttgacttgggacctgttcttagttgcataacagaactctgcagtgtacacactgctatttgatgttttatctgctttttaaaaataatgatatcagtgagtctcttcctatccatgatgctgtatagtcagtgtaaaaagcattttgtttcccatttattgaatgttttttctttagcgatttcttgagtttaaatatactaagcgcaggaaatcctcacagaataaagttggttctgggaaacagaagtggaacaataagttataggaatacatattttgattatagacagtgatgatggtggtatgcgtttatcttttggtaatgtcagtttcacctaacgtgatttttgaaggactttgaattgtaaatgcaaacctactcaaactaacccaaattttgtactgttaaaagttttggccatttctttacatttttccatgactgtcatataatttttaggttgatatgttgattgaacatatcaacctaaattgatatgttcaatcaacatattggtcgttcaggggagtattgtaaaaaggcatctactctgaaagattgttcacatgatcattaaaataggaacaattctagttcagcttttattgtgtttgcattttgtgatttgcaaaatacatgttttattgaataaagagatggtgaatgagcaggctgaaaaaaaattgatttttatgctcaagtagaatatagccagttgagataatgtttgtgttgggttttggaattctctcacgtcaaggcatacacaatgcaaaagatattgtatgtttcatatgagctcctccagctctccctcttgcagggcacagggtttgcaagtgaaggcaagagaatgaagcattttaatgaagccctggaagactagaaagttagttatcaatggaaggaattatcaagttagtttttactttagaaagcagaatataaattatatcacagctttttatcaaaacctaggttttaattaattttcaaagtattcatatcatttactgcattttcccatgcctcctttacgtacaccctaatgccctaatgtgattacttgccatgattctgccaatacttgtatggagttacttgcttaaaagagtggcaattaacgaccatttcatgtacattaagccacatgagctgaaaaaatagactatatagttacttataaacttgtctgtatggcctttatttatcccctaggtgttaggtgtttatttatttgaaaggctagagtgattgtagtatagtgttattggaaaaaatgtctactgtagaaacatctttggagattttattctgctagcattgttttccttaaagtaaatcaaatacatatccacaggcacctgtagtcaaaatagttgtcaggttaatgatcatccaagagagtattgaagtcacaggagtctggccacagtgtgaggaggctccaccagtgagtgtagtgagttaataaagccaaggcatctggaccagccattccttgcctgttgtcttcctccccggatgtcccagtgtcccagcctggggttctgccccaggatcaagggctgtaccatgaggacacagctactcatctctaaatcctggggatgcacacacacatgtacacatcccttggcctctcccaggcctcctttgtcctgacctctgtagagccgtcctctacctcaggtaaggagagaactacatgggcaaagtccacactcagcctttatctatttactccaaaaggggtttaagacagcgggagttttattttagctagattcaggattcacttagaactgtttgcagagttaagaggcaatgcagaagaaaatccctcataaatgtttgttcctctgttaaatctgaattgtataaatggcagtaggtgacattcaatactaatagaaataatagtaatataatagttgcaatttactagctatgtaactttaggcaaaatatttaacttttatctgcttgttttctcatctgtaaaatagagataattgttgtacttagagtgattgtaatggttaaatgagttgatatatgtacaactctgagaactatgtgcctggcacatagtaagtactatgttggcattaattatcctaagctcctattatcaagtatggagcgaagtgctttatgtatgtcattttgttaatcctcataatgactctgtgggctgtaggtttgcttatagctgtctcacagatgataaaactgtgccacagagaggtttaagtaactttcctgaggttacatatttaggcacaatctgactggggcagctgcctgaatctgaagctcagtgttcatactaaccttgccaagaagtttacagaatagcatctttttttcaaaagaagagagacttgaagtcatccccttcagtcctctcattcctgccccctcaggtcctcttcattgtgatgatgcagagaaccggaatggtcagcctcatggccttttctgggtgataggatctgtctgtccctcaggtcccagaagctacgtcaccctttctcccagcctccgcgtaatggctactgcgtgcctaagcgttgctgtcacctgggccagggtcattcctctgtgtttcctgcagtaccttcccctcatgttggctgctttctgaagagccctagctccttgttgtgttacctgggcttgtgctacctgttctcctctccctcgccccacaaacacaacaccaaaagggcttgtaggcgagaattacagcctatacagcctgtttacccacaccacacacccagccctgagcatggcagcatgcaacacattctatttagttggttggtttggaaatgaatttgatgtctattatttggggttaatctcagcccattattttcattttattttaattgatataaagtccacataccataaaattcaccctaaattcatcatttcaaattgaaggcaatttattatgtttactaggtgctctgggttgaatgtgtcccccagagtttacatgtcagaaatgtaatccctaatgcaactgtgttgggaggtagggcctaataggaggctgtgctctcttgaatggattaatgtcattatggcaagagtagattagttatcttgggaatgggcttgttataaactcgagtttggccctgtcttgctgtcttgcccttgcaagaggacataagatgaaggccttcaccagatgctagtgccatgctcttggactttccagcctccagaaccaaatatacttctgttgtttataaattacccagtctcaggaattccattataacaacacaaaatggactaagacactaggatattttaattttgttcgtcttgattttcatgatttctgggacaccatgatttggaaggtaaaccatttttaaataatgatttttttaaagactgtatgaatttaggtgaggagcttgacctagactctgaactagcacactgaagttaaaaagatggactgtagagagatatgggctgtgggcccaggaacccttccataccctcctgccttggttgaagacccatttcgtgctgccatccaatgcctaactgctaatttcattgggagatagaatcacatgacttggatatattcttgattaatttaatgtgatttaaaaatatcctgtattcctgcctgtccatcaagttctccaaattcttgtcatttctaaatggagaatggagtaactcaacaaagtcagagagggcttttttgtttggctctttgccaaaatgcctataggttagagggttacacagaaaatctactttacagcagttgtacgttaagtagctgtggattgctatttgtcaaacatcagaaacaattttattttggggaatagaaagagaatttctctgtatgttagcagggacagaaaatatgcttctgattaatgggattgcaggcagtcattagaaggattgaaagactggagaaaaattccttaaaattttgaactgttgcatatgatattatataagagtaagttagtttacttgttcgtaggattcctttataccctttgttacaataacttatgcatgcactagcttggagcctatatcacaaaactgccttggttatttgaaaatattacattgtagataatgttatctacatataaaaagcctttgctatgtgaataatcatgtcagaactgggtaaaaatagtttagtgggcaggtatatgtagcaaaagagaatagaggcatgatagagtgaatctgaggaaaaatcctgttgatttggatagtttaggctccaggtcgatctcggtaggggtggtggttacacaggtattaccaaatacctcaggctgctgggtcttctgcagtactgtgaagaatttgaggatgagagaaaagagaacttcccagtcctctagatgtgacagtccttgtggcagtgccatatccccctaaggaggagctgggttattggaaattgttcagtggaggggcctgggatagtggcaggaggcagaggtgctaaggatacaggtggcagaagcgaagctcatagagcagaaataggcaggattccagaagtgggcagccttccagaagtggtgtgcccagtattcttttattcactagtttatggacttctttcgcagggacacattttaatgaagtctctttggaagaaaatttgcatggctgagatgctgggttttggagttgatggaactgccgagttaaaatagcttttttgtgtgtgcaggtagtgtgaaagagccacatacactatcagtaaagccgctgtctgagagagttaaagaggcagacagacagttaaggttaattggagtgatcagcttgtgcaggccacgaacctgcatcatccacaccaaagcaagttgagttcaggcagtagatgctggaggtgttaaaaatgggacttacagagctagactgcctggatctgaattctagttcctcttcgcaattgctaagtattatcgtgacagagatattttctgtcctatgttaagtgagactactgatagtacctgtttttatatagttatctacacacacacacacatacatatatgactatatatatgactatatatatatgactgtatataactatatatagtcagcatcatcatatcatctaatactaattgggagctatatgtgtacaaactcaatcatcatcatcatcatcatcatcatcatcatcatcatcatcatcacccaatacttaaccggagttttatgtggattaacccattcagtcctcaagaatgacagacgtcaaaatggacatggcagtcaggagaaagtgtacaatgtgcaaaagagtaggggtggctgccttctctgtctagctaagggctctctacatcttatcaccatgctgtccagtccccaccccaatgacttgactgctctccttttttttttttttccacaacattgccctcagaccacttaattgacactgactaatggctggccttgaattaacgtctgcatcaatggatggatgccctgtttgtatccatcttcctggccttactttggggtctcagaagacagaaatggtgtgttctatttaccatcctagagtcatagaagatttgtggttctttttatcagatgaggacccagagttctgcacagggttcttcttacccacaaagtaaggttcttcttacaggtggcaagggagagagaatttgtagagacctttagttctctgtcacttcagacagggattgcctctctggtgtctagcctctaaaagtcatcatgttccttaggtttctatttccctttgcacaaatttagcctcaggcagactcaagcacagcttttaggtttgtaaaaccttgacaagtcctggagccttttcttaatacagagccccctggcaaggaacagcttcagaggtaagctgtgagcaggggcttgcttgatggttcctggaggattgaagatggggaagagtttgttcattatacttcccattctattaagaatcccaccaaactggcccactgggtggctggaataaaggaagtgttaggaagcagctggcataaagatctacccagcctactggttgaggatttttttttcccccctaaaagacatacattgccaggaaaagctaacaaaaatttcaaggcagatttggaggaattaaattattcttaggcacattgcctggtttctaagcatttagggatatgtaaatgttcatgttctttagaggtctctgtctcttttgtacagagtacattagtactaaaaatgagatttgctagttctacattttcatgtgaatttatgcagtgaatattcaatttgattctggatctttcaaaaggaaaggctttctttaaacaaataatatagcttatttttctgatatgctctattggttgctttgatttttttctccgacaactgaaatgcgaagtagagtactatccccaattaatattcttgctccacaaagacttccagtgtttgtttttgcttcttttaatatgtaactctcctaagtgtgttattgtattacagctaagaggctttacccatgtaaagttgaatactttacacttctgaatgccaacataacaattaatctatgattagattttgcttcttaagatgcctccactgacgagtgcctgtaatattaaacttctaaagtgttccactctttaaaacttataaaagctctctttgatatagcccactgaaattgtgtggctattgtttttattgctttattgtgcagccagcttaactgaaacctttgggtggcttttactctttataataaagataacattgagaaatgcctggagtacaaagtgtatatgtgtacatgccgttctcagccatctactctgacttagtaactctctaattcccttgcctccactatgtttaagaacaaaaaagaaaaacacttacatttcacatttcctccatcaagctgtctttatagagtggtctgtagcaaccattgctacttcctctctaatattttttaactccttaagatgttgttgctgtcctcactgctggactggaatctgcgtgatgattccatcatgggcgaagccccaaattatttagccttgactcagtctctcctgtctggatgcctttgcaggatttagtcttagggatcacattttcctacttgaactcttcttccttgtttttgggatgttgtctctaaaccttgactttccttcctcagttacatacattgaacttcactatttggcccttggatcatttttttttttttttaacttttgatttgtccttgtgagctcttccattccattgaattcagccttgcctaattgtggccgattgccaaatccctagcatgtttcctcttctgaatcacagaccagggtttcatcagccactagcacacttgcacaggggtgcccagaatcaccgtcagcccatcaggtcacctggcttctctttgcctgatagtgctccaaactctcattaatgcaggatcaggcaccctttgctcctctcgttctcgccgcacatttaagcatttgccacatcccacatgttctttctctgcagtgtttatttcactcctcccctttccacacctgctgctgccaccctggtttgtgtcctcactacctcttggccagacctctgcaacacacctttctcgcacactgtggttagattgatattcctggagtgcagctctgatcccgttgctcacttttcaccaagccctttccgtgttccacactgtgggctgaattactcacaaactcagcatgggcatgcgtgatgtcctacagcccctacctaaatctctaaccccaatcccactgctccctctttggctccagacggattggactgcctgttctagctcttctcagaatatgacattttcttggtcacttctgtaactagcgtccgaccacacatgccattctgtcttcagattcctgcagttagtgtgctttctccctcgtttgaaccctgcagtgtttagtttctgcctctcttatgacatgtactagtgttgtggctctgtgtactctgagccacattatcagcgataatgtcacattatcgctaagacattgcctcatgccgacactcctcccctctgcccccgcccggtgttcttagaaggcagggactgccttactaatctctgttgtgtcaagcaatagcacactggcctgtgtctgtctgccaaatcgattaagtacttgttgaatggaagtagaaattccaattaacacagatggcaaagtgtgctgttcattcttaagtctcgtttttttcattcctaggtgaagctcgtgtgtggagtgccacggtacaatcagacgacagatggacagtgtgacaaaagtgtcagaaaggattgggcctcgctgtgagagtcagcctggattcaaagtgttgacaagttgctgaaaaggaagccagtgagaggactgtggcacgcagaggaagtggagccctgtcttcggtcacaccattgatggaggacagatggacagccgtatggccagtcacctctcctcttaaacctttggagagtggtcctttgtcctctgctggacacataataggaattctaacacattctctgaattcacttttcataaaaacgtaaaatcagactgctctgtacaaccaggctcaactgttgcatggtagcagatttgcaaacatgagtgctgaggggtaccagtacagagcgctgtatgattataaaaaggaaagagaagaagatattgacttgcacttgggtgacatattgactgtgaataaagggtccttagtagctcttggattcagtgatggacaggaagccaggcctgaagaaattggctggttaaatggctataatgaaaccacaggggaaaggggggactttccgggaacttacgtagaatatattggaaggaaaaaaatctcgcctcccacaccaaagccccggccacctcggcctcttcctgttgcaccaggttcttcgaaaactgaagcagatgttgaacaacaaggtcagtattgataagtggttgcttaatgactccctttctttttctttttaaggaaaagtcttaagtttgggttgagtcgttatgttctgggcagaagttaccttggcaactgcacctgaattgatgtgtggtgcataaaagcttggtcaatcattacacaactagaaatttgtgtttgtggggttggaagttgttataaaaatagggacacagtatccgagaacctgtttagtgagtgtcgttgaacactattattatagttgtcattgaattaaacatctactatatttcttatttttgtaattggcattataggcggagtattcctagtctgaaaatatgaaatctaaaatgctgaaaaacccaaaattttttgacacccaaaggaaattctcattagagcattccagaattcagattcagtggtcaaggggtataatgcaaatattccaaaatccagaacaacatgaaatctacaacacttctggttccaagcatttcagataaggaatactcaacctgtgtatatctaataataattttgggaaagtggagggtaagtctaatataagtatatttaacatgatttgtatggaaaaatgtagagagtaataaaatgaccacagaactcggctgagaagaaaccattgtttttataacctggtatctacctcttggtttcctctccaggatcgctgtggccaaagctgaaacccaatcctatagttagtataaaagtaaagggatttcacttcctttgtgggtagtgtcatttgtagcattaatgcctatagtctggttcgccttcatgagggggaagaaaaattcactgaatactttgcttaaatggaaaccaccttcattcaaaaaccacttattgcttattggagatggtccatacttgcgcttcaggcacagctgtgtctttaaggtttatcttctgttcggtttcacacagagacaagccttatgctcagctttgctgttatcagctttgtcaaataccggtttcctcactagtaaatcacacgcatttttcttttttctcttgtgtagtcttctttcttagggtctaagaagggaatgggaaggaatggtttaagatgggtgggcctaactgcagtagttatatattgaggagacctgactggcatcacaggatatttctggaagagattctgataccactagtaagctattataccttctttaatgttgccttattctaacacaagtgaataagacaatgagaacagagaaacagaatgcaagggtaagagctgcctttcagtattgagtagtaatagattgggaatattgtgttaaaatcaaggaatttattaatgatacctgaagggaagcccttttctttcccatacccagcccaaagggatacttatttcataaatgttatactttataatgttcaaataatatcttttattatattgttcaaaagccaaagttaatttttctttgcagatcaatcaaaaaaccatgactctccgcacatacataagtgattttatcaaccattgcagcacttagcagattgaagatacatacgtaatcgtttttctccaccaagttatatattttcaccttttattttttttaagttaaaaacgctttcttcagtagcctaattccaaaggaaaagtgatttaatttttccgagaatacagagctttacagaatcataaaaatagttgaattagagaagattatttaaaaggtggaataagggcaccttgtcaagattagttacaaaacaattttataaaagcagtttctaaacaaaatttgcatttgataattgctatcaggtgcaagtttctttggctctggtgtacagaaaagcaagtctttccttataggaaaagtcattttctctttttatatcctaaactattttataatgcttgctttctcatgtaatgtgatgacaattgagatttttagcagctttttcatttttctttaatacatggaaagatggagtgaaatgaaaatttttagcagaattcaagaaagagacccatgataatgtgcataaaagtattagagcctgaatataaatgagaaattagtaataactgaaagattgaaaggagagtgttgggggggggtcatgtggggagtataatactaaacattcaattttctagaagtgttggtcttgtattctcatttaaatattcctatgaagcgagaattcaatagctcctatgagttgcatgttgaattcatatggaaagtagttataaggacaaattttatatgttagaacctgtgagactagtttcttttgcctccgtttgtatttctttgaaaagcttttgcagtgacaaattgtgtgaaggcaagaaatgatagttctgttctattcttaccataattgaattctttagttcttttctttttttttccttttaacaccctccacctccacctgacttagccagtttttcatgttatgctgtgtttattgcatttagaaggttattcctcaccaacccccaccccaggtctaggaaccacatgcagttttgttttgtggacttggcacacctcgttaatgggcagcagggtagacagagggtgcgaggacagcctgcatgccaattgtgtgtctgtgtcctgctgagccttgctgccctctctgtttttaaaaggaaattgtccttagactctggccaagagtacgttctgtgagagattcctccctgtacgatagtgtcttacttttccactttgcttgtatgttcttggaaataaagctgtgatatttaactttttgagagaaagagtcaaaaacccattaggaaatcttatatacggcactgtactttcttccaatacattttgcatgcagtttttaggaagccctggcatatagattgaatgaattgttttaattggataattttggatgtttttggacttaaatacattcagtaagcatggtctgagtccttattttgtgctggaaagcaaagataaaagatgaaatcaaggctcaagagccagcatgccctgagatgctctctcatgcctctcttccacctttggagctgtgctttttctcctctgctagtacagctcttcccctagacatctgcctgactgacccactctcacttctctgctcaaatctttcgtctcatggagtctggctctactcacgctattctatgctgggacctacctctctgcttttgcaaatcattgattacttaacccacgatatcgtttacttattacgtttattgttcattgactgttccctctgttagattttaagctccataaggggagagatctttgtggtcccccattatcctaagtacctaggacagtgtggtagtttcccaacatgctggtaaacaggtgctgctgcagctcatcctacagctatttcactttctgcattgcttttgaaattgaccacgtgctctgaatgtcatgtgcagtcatacaaagcttaatggcccatcttgttttagaaaataacagcttatttgttatccacatccttcatctgaggcatcctgccttggccttaaccattgcctggtatgtctccagaactctttattttcttcccagggcctgggacaggtagttctgctggtgggaaagtgcattaagctgatagtaccttcagtcacttaagccaagtgagtagaggggctgtcatggtcagcgaatatcctcagggcaaattctgtgccctttctcccatccttttatctccttccctttgcatgggggctaaaattgccaatatgaggatgacgttttattttatttttctacaagccagtagagccctatgttatgttcttcggagagaacctcttccatgttttgtttggataaagagtgtgctgggtgtgcaaggtgggtgttacatgtcctcgggtgaggcagctattgaaaggcaatcttatggctctttctgctttagcttgctcagatcctggcatcccatcccgctacaccaaccccattcagccagggtcctgtattttctcttgtacacaacgaaatgagttgattgaaaatggggatatagggatatgggaataaaaatatattcctctgtcatatgtaagccatccagtggggctatttctcaagacagtggttttaactcatactttgagatcctttaattaaagtcatgctaatgcagaatatttagacgggtgagagtctgtgcccatgttagtttgtgcagtgcagtgaaacctgctaacacaagagattacttactgcatacccacctccatcctgacctgcacaaccctccctggctcctcctgcagcctctgacagtggatttcagctggtttcaaacctaagacataaagcatgcatttgacatggcttacgctaaattttgatcaaaatcccttttaaacagaaagaaaaaggccaccattggtgttggttttcatggtttcccaaggcatgttattgttaaatttttcacattcagcatttgagtgtcccttcatggttgttgttccctgtccagaaagcagggctgcaataaatcacaaacattgactacactgtacagaggtcacagaaaatagtgacctgatcccaaattacacacctctgctgagcccgttggtcataacctacgctgtctccttgaggcaaatagtgcttgtgcaagtaatttgctttgcttcacaaattcctgcctttacgaattctgttttctttcagaatatactttctcataacattcttcactcttccttcctacttaagtctttgctgtgaacttggaggtttgtcttgttaagcccaagtgatggggaaaaccacccaatttatggtgctgactgctcattctgcatctatcgaccactctgtttttgcgagaaagttgggtcagttacaggatcttagaagataagggcctttgagctctgtctctaacttctgaccacaagaaaagttcatcaggacattatggagatttttacccaggcatgaaaatttaagtgtttgccctctgtgtttcagtaggaaatgaaatatatttctactgaaatataattgattaaagagtgtgtctggaaaaaacaaatgtgctaattattttgaataaaatcagattagcctaaccacttagggtcacagaatatgtcatttgcatattaaattacttattgcaacacagttcaccctctcatgagcatttatattctcaatacattcttgattttttaaaaacattttttctgttaactttgtttccctaaaaatgtgtaagagaaaggaaagtagccctaattagcgatttgtgtatccgtggttttttgaaaatgaaattgacaaaaagagacaggatgctcacttttattgctttttgcaggagggttcttaccctgagctggcctggccactttaggaattcacaggcacgctctgaggggcctgtgagtagggaggctctcttacccagaggggagaggaaggcatttctccctccttccctcagtctgttatttgaagggaatcacttgaactgctctcctagagctgcggtgacagttaagtccagggttgcagaataagacagtatttgaggagaagaagctttctgccaggtgtctgtttctgcctctgtcctttagaatcacagggttatggtaggcaagttatattttcttatttaagtgaaatgtttgttcagatgcttttgttaaggcttctgttctatacacttctttctgtgttcttttttcaaaaatgggaaaagggtccagtgtccttatatgtatatcctaagtaaagccctcacacacctctgattcaaataggagttatttaattagagggagcatattttgttttctggcaactaagttaatgttgatattctaatacaattttctttgttataaatatggaactctctatttaacttgtcaatagattctttgataaatttgatgtcagtcttctctggtttctaggtgatgcatctttgtctacaacaagagacattctgattagtaagaatttcttctctgagttagaaaaaaaattagaaattctgaaattcaacaacaaatgctgacttacatctgctaagtagcacccaaaaaggggagaattttttacctatggcaaataagagtgccaaatgtgacatcatttacatatccatgttttgattagtaaaaaccaaacagatgttagcagtacagctggctcttgcatatatgtgtatctttgttgctaacagatttccatggggaaggatgtagcactggtctgaagtctcagataggagaagataacatggtgtgatagcttgaaatgaggagcataattgcatgatggattatatctgaatgttttgaggtcttgagtttatagcattcgatatcaaagcagtccttaggctttcaatagaggaggacacatggagggggacaaagtgaactagaaatgggctttatttcaattgcttgggtatagtgtacctaaaatgtcaagttgtttaacagaatatcagactactttataaatgtgttattccttcttaccaatttatgtaatattttatttttactatgaaaattccatgcagtatacaaacagtacgtggaattgtagtagaaacattgttaaaatataactttgaattaaaaacaaaacatggtatacattgttatataatggataacatagtgtatacattgttaaaatatatccttgcaattaaaaacaaaacaaatcagctgcaaacctttgtttaattatgtatgcagaactttctcccaatggctttataccacctaaggcatggctgtgattttcaggaataccctctctggactgtttcttgcttggaggtgtttgcgatgtatttgtatttgtctgtctatctattctcagttggtagattatgtaatgcctatagattattctgtcctgtcacagtttgattcattttgaagttataactgtgaatttattacagcgtattgcaggagacgtaatttgatgatcaaatctgatatccaagatcgtaaagaatataggcataaatgaaatataaatctgtgatatattatttgaatcagaaattccacattgctttgctttctataaattccttaacgttctagttccagtgttctctaattgtaagatgagaagctaaatgctgtctcttttgagtttcagcagtttttgttttaatccttctcttcccaatcagaagaactgtcggagaaataagacccagaaaaattggttctcactagtagtgtttccccaataatgcaacccagaagccctgtatatgagaataagggaatgtagtgagaggatttatgcagagaaacaacctaggatggttggaaagatgtacttacatgacctcattgcacgatctgattggagactggtccatggattgtatgggattattgcttatgaaagtgcccacctggtatcaagtttttgcagatgcatgcggtgtatggttttaagacatgtttcaccagtgtgaatatttaggctctacttctgttggtgggcagttagcaattgctggtatctaaactggtttgagacttactgcctcatttgaacagtatctgtgcagtagcgctaaactcgttgacatgatctgtactgagagttcctacagatttgtttcatatatatttgttaaattttccaaggtaagtagagagtgatggttataacatttgtttattcagacccctctaaatctacctaagaggtaacatgttagcataggcattagacaaggctgcattgtgaagtcagagtgactgtctggggttgtcactgtcatcttccaagctttctcctaaagaagaaaattgacataatgctctcagacttggcacatgggaccagtgccacagcaagcactggttctagcctgctactggtttttggtaaaatgcagttttcagaactactcaagggtgtaataagattaatttttatgatattagatataatatgttaactttttagctattgttaatcttaaacactgatggctttatttttattctatttaaaaaaataatttttgaggccaggtgcagtggctcacacctgtaatcccagcattttgggaggccaaggtgggcagatcacttgaggtcaggagatcaaaaccagcatggccaatatggtgaaaccccatctctactaaaaatacaaaaattagctgggtgtgatggtgcatgcctgtaatcccagctactagggaggctgaggcaggagaatcgcttgaaactgggaggcagaggttgcagtgagccgagattgtgccactgcactttagcctgggtgacagagtgaaagtgtctcaaaataaataaataaataaataaataaataaataaataaataaataattttcaatgcttaagaattttttatcagtaaacagttcatttgaatttttttttgcattcttgtttcccaactatagaaacatagctgaatatttgtggcatcattaatgcataatttcaaagcattttacacattgttaattaaatctcaccatgttctttcaggtagcaaaaagtaagtttatttttgattcagaagtatttgaagaagttagaacaagatgattttattgctaaataataaggaatatctgtggagtaccaaggaatgagatataatgaatttggttagagtatatcaaagtacatattatagtttttgtcttacacttccctgtgggtctgtttaactattgaaaatgtcttcttcaaaatgaaccttaaacatttgcaaacttactctttgctaattattctgccaggcatttttttttttcttttttttttgaatcttgctctgttgcccaggctggagtgcagtggctcaatctcagctgactgcaacctctgcctcctgggttcaagcagttctccagccacagcctcccaagtagctgggactacaggcacatgctgccacgcctggctaatttttgtatttttagtagagacagggtttcaccatattggtcaggctggtctcgaactcctaacctcaggtgatccacccacctcggcctcctaaactggtgggattaccagcgcgagccaccacgctggccctgccaggcattttatagacatttttcatttgacgctcacaaccaccctgcaaagatggcatattataacctttttttgtttgtttgtttgtttttttgagatggagtctcgctctgtcgcccgggctggagagcagtggcacgatctcggctcactgcaagctccgcctcctgggttcacgccattctcctgtctcagcctcccgagtagctgggactacaggcacctgccaccacgcccgtctaattttttgtattttttgtagagacggggtttcactgtgttagccaggatggtctcgatctcttgaccttgtgatccgcccacctcggcctcccaaagtgctgggattgcaggcatgagccaccacgcctggccctataaccgtttttgagatttaaaaactgaaggtcatgtgattgtgtaaatatttaaaaagtgatcatattaaaaaatatcatagtgatggcacattgataagattcaagaacattttgggcaaggcaggcagtcatgaggatctccttaagcagtctcttgtgaagtgatcggtaactgaattttgctttttgggtggtcttcaattatgtctgctttatctgttaggtttcactagctattacattcatgcaactccagaaatttacctccaatttatatgtgacttacaacattttcttatgtctggtaaatatttgaaaggattgaattacaaagagacggataaggccatgaagctaagacaaagttttgggtatgtgcatgtaaatgcaatttttctcaggaagaaatacaccatgatcagataactcaaaagttttataaccttgataaatagatttaccttcgtttctgttgtttttgaagaagttaaatgtctgctttaaatgtttccctgagtttcaagttttcttatttcagactcataattatatcattttgattaaaatggagcacagactggagttattacttgcttaaaagccaaaaacttgagggtatccagcataagaattgtgtgttttggtctgtggatagcagctgcttgaagtccataaaaacaagaaacctgaagttgattcagatgaatctgaagtcttgtacctgaattatgtcaaggttagcagtaaatgccatttaaaaagactgagtacaaattgccaaattcctttgaatgccaaaccatatttctcaggaaagttggccactgccaaatttataacatttgtgtttctgttacctgaattccaagggcagaggggtgattgagggggtaagggaaaggcacaggtgaattttattttcagatgtctaataggacagtgtgacattgcccagagatagtctctcaaaggtagtgagtgccagcagaacttctcgaatgcgaagttgagaaattttacttatttacttattttcccattgaaaaaaaaaaaaaaaactttaaatgttttctgagttaaaaaggcctctgactggtagtcctgacacagcttcttgagagtctccgagagagcctcttctcagtacaattcctaagaagataggaagaaaaaaaaaaatattcttaacacataaaactagaattagtgggaagaaatgcctactgtaaactcaacagaaccggggttaaaaaatataggataagttttgactacctaaaagtagcagggcagacccatctcttccctaactctgtccataattcagaaagggcccagggaactgtcctcaggaatgctcttcccccctcttccttgtcctctccgacagagcctttctaatcagtaggaggtcacaacttagaaaataaccagagagagctggaatggtaagttaggggctattactgttatattctgagaatcctgatccatgaaaataaagtgctgaaggtggggtagagttagaaagacctgtgttcactgagggttttgagtattacaggctctccatcactcagagcatcagaaagtcaggcggtgaacgcaggagatttttctctcaggctaaccaaaaccatgttgaaatgaaaaccaccttggaactggccttttcatctcagactgccaaataactagcacccaagtggatcccttagctcagagcagtcaccaggcatgggtaggtctttccttgtttagtgataaacaggaaaaacctaaccgagcctactgaaccatgtccatctataaaagaaaaagggagatcatactggagatttgaaagaagagtagacctccagaactgattgattataatttatttctgttatagtatttccacttagtattatgatttatttctgtccctcatgaaagggacagaaagtagtcaggcggttatgagatgaaaagacagtaagatgggatgaaatcggagtgaaacaataaaaaaaagactaagttaaaaatgtaatagcatattaaaattcatgtgtaagggggtaatgagctgaaaataaagtctgtgttttgaaggagaaacaagataaagctctttggaatccaaaggataaaaacataaaatgagggagaagatatatagagagaatatctaacaggagaattacaagtgttgataaacagggaaccaagtgaaatagaacaacatcattataagaagttttcatgcacgtgtgcagatttgaaagtgttgccgtatttttcatgtgaaatcaatgaaaaatatgtttgggcatttctatttaagaataatgttaaagtaccttgccaaaatatctggcaagatattagctaccagggaacaaagttgtttttcttctcctttctagcaataaatgccaaaaaaaaaaaaaaatagtgcattgattttagtagagttttgaggagaaaagatggtgacttaagaacttactgagcttcctccttatatgttatgtggaaaggcaattgagaggcattcgttgataagcaggagctcaggaaagatacactaaacctcttgttcacgtgggagtacctaaaggttgcctttttattgttaagctttataatttaaaaaggtgtaaatttaaacttaattcattttggttaacttcagtaattatcaaaataataaaactataaagtatgtatcttctaaacacctagaaatatatattccaaaagataggcaacaaagaaagaataaaaataatacagggaaaatgtttactatatatgactactttaaagaaatacagacattaacatatgtatgtacgtatatacacatacatatatacatataaaattgaccatatacatatatttgtgtgttcaacacacgcattatttttcaggtactgcactaaccttttattccattgacttgttacttttcctaagaactctgtgacactggccttattatacctgttttaaagataaacaagtttagttagagatggcccaaggtcacacagctagtggaggagctgggatttgaccccaaacagtctgactgttgacccaatgctcttaagcaactgtgcaatacagcgaaaggggcgccgggggttaatgttcacactgcttgatgctgctgacttccgaccagccacaaggcaccccggagccaaaggcagatgactccctggcttgccagtgacgtgtgatgcggtctgatatgacaaagtgagttaaacaagcagatttttcctctcaggaaacagacacaagaacaactgaaaagaataaagcagatgtgtgagttactattccttacagcaaaagaacctcatcagaaccgcaggctggaaagaggtgattacttttaaagggcagttcattcctcctgcatgttggaaactgtggctcttaactggctaaaattttaactttcagtgtagccctcacttggcttgtgcttcttaatgttgtagataacattatagatttatataatattcaacttttatatatatattacttatatataaatgtttatgtataaatatatatttgtatataatatgtattcgtatatgatatgtagtaaatgttatatttaaaccatcatatagaaaagccattattgggtacactgtacaaatctgcctttataattgagtgtactgttctactaaaagcagctttagagaaaggattgaaagccagctctttctacttcactagccttcattgtttggattggcattatgtgtacagttatattgtaactgtcacttgtggtctaatcttccccttaggggaaacttgagaaacctggtcagctttaacatttagaggaagtttaaacatattggagcataaaattcacagttgtttaactgaaactccagttcttgtcagaccacatctctccagcccttctgtgattggaatcatctaactttggccctcaataaggaaaactttgacaagatgcaaaaaatgtttactcttgttttctttgccaggaacctgagtctgcagcagactctgagacctctttgcctaccccaaataagtgaattgtcactgtaactgttttttatccccataactgctttcggtgaatgccaatctagttgttacatgcctttaatattttgggtaattatgttctttaagaatgaaaatattttttccttccttcctttcttctttccttcctggttttgttatagtctagctgtgagaccagttgcctttcatatattctagaagagaaggatgaggtgagtttcacagtgatctttttccaaaatacaaaaccactgtcactctccacttcccaggcaaccccactcattctattttctagtgagggttttgcttagatgatgacgagtctcttgattcagtggactcctaagggaccatctttcaccagcaccaaatgctgtttagttcacatattgaaatgttttaaattataacttagcaattgtagttagtaatcttcacattatattgtctcacatttaatgtataatttcctaagagaaggaaatggtcctggtgggggtcaatagttatagtaactattaataatactgatgactactagttaatagtaattaaggcctcctaaaatgagaggaaaaaaaatcttttgtttataaggtttaaaaagaagagttgatacttaatagttttagtaaaaccccagtgcatgttcgattaattttgttactttattctgggcatgtagttgaataattacctgcatttttgatttgctgaaaaggtggtggttacaattttttttgttttttttttttttacagtactgtttttagttcattacattgagatgctacattttccttttcttaaatacatgcaagatgaaatgttttacctctgagatgaaaaatttgaaatttctttaatgtgactccttactaacacaattgcaggcaagcattgaacatttgctttgttccaggcaccatgtgctgtgtgctctacctacctaatctcacttagtccacttagtgctatttgcaggttgaggcttagaaagaaaaagaaacttgcccagagtccaacactagtagctggtaaagagctggtctttgcatgcagcctctctcacttcaggatgggtgcttcccagcaccacactgtaccaccctcaagacgagttgcaggaggaaaggaacctctagtggtattaactaaatcttagcaagtagttgcctgtaaattgtagacttttaaatacaatctcacatttctgtgatctttacccatacaccagttaccttcaaactaatttaagaatcttatagatattaaaaatgcttgattggccaatatctcatttctgtcaaaatcatgtactagaagcatgtatcaaatcagagacttatttatgacaatttgcacacacatttggataaaatgcatcaacttctttcaaagtttacttgaaataaaaagggaagaatacgaagtatcacaggttaaagcaatgccctcattccatttaggcaaaagtgttgtgctatttgaatagtgttagtttgagaatatggagttgtactccttatagcaattccaacctagaaaaatgtttgtgttttaattgatgggttaggcaaaaagttaatctttgcatagaggaaagaaacagctctgacttagaggttttggggctagaacatggatcaagtgtctgaagtttttcatgtggcctcaagttgaatcttggtcagagaatacacggtggtcaaacttcacaccatagtcataatgtatgaagccaaaagaaaagtcctagttgctgggtgcttccattatatcatcaacctgggtttaatgattttattggaagcacgacttccagtgaggcaaggcagtaagccccagaagagaggccttccatgggtagataggaactcaaatgctttcccaggctggacccaggagactgtgtcagctactgtgatatggcttgccaccaggacagatcattctacccgtctaaggagttagggtatccccaagagctgtgatgggaggtggaaattcacacctgtgaaatgggaggtatgctgagttgaacgggatagcccaaggcctgtccatgaactgagccatggccaaggatttcttaattctagaggcctccttcttgagcttgccttcttttgaacttggccctcagtgtctgggtaagttggagcgtgactatccagggaaagcccctggtttgtatttagtcaagttggccagagaagactggatctaagcgggaataaaatttgctgacccccatctcagaggttaacattttcatttgtgttttgcatgactcattttaaattacagtgctctacaagtatagaaagaagccttcctcttcccaccgtccccagacaccacataatggaaaaagcaagaattttctgcataagcaaggccttaaaaaaaaaaaagccagcctctgatgggacttctttcctgccagaaatcccactggtccactgtcgcaatttttacaaaaggccacgatgaaagagtaaggcccattttgagccctttgcttctgtattatgtgaaacataacttgtatgtttcacatatgttcttggtatcagaagaattgttagtttttgaacatgtaaaatctactagggtctctgactgttaaagtataattttgattaagaaaagatttgttccactgctttgattagacacataaaactttgaaaagttttgatgttctgtttcctgttttaaaaaaatatgtcctctcctatgaactctaactagatgagaggattttcctcagagaaaattcagccctgggaagaaccatctatggaggtcataacctagaaaattcttcaagggaagttgcagtgaattaaaagagggcggagttagaaagtcctgttctaccaaatttgtgctaatagttgcacctttctttctttcccagaatggtcactggagaaaatgtgtaaaccaactgcaaacaagtttatccgttgccacctttcttttcctttagtgacagttcaattcgttaacctgaaggagctactgtaccatcaagactagctcccagcccagggcttcagcataaagcagctgctcagttaattttggtggatcacgggcagaaacaagttacctttgggatgcagattctgaatagtctgccatgaaatgattaaatgaatgagagtgatgaggggctacttaattggactatgtaaaatggctccttaagcttcgtggacaattgagtaatttcagtttcctctcttcactcttgtttacttcctgctcttctagcatcaagtgttaggtattctgttctcttacaatgagaagattaaacagctgtagtttaaattaaagcattaatttggagtgttctgtggctacattaattatattttctactaagattaaattgcagatggatataagcagcaatatatgtttatccagggcaaaccagaattctgttaaccagccatccttggtgactttttatttatatataaaaacctttttaaactgaaataatgtaacttgatttttccccccagttaggtagaagaaaaaataattggatgcagaaaacagttgtatggagcgtatttgcataggtacaggacttgagtgacagaaaattccttttatttttttccccagtgggatttagcaaaaagcatgtgttgaaagtctcttgactaaatggatcataattaaagactttgggatttatttatgggtattttaattagaaacattaagttcactcagtggtccttgtgaaaacttttttctaactgcttattttatatcaagtaataaataaaatttctgtgggtatgaagatgagttttagggccgcctatttctctaggaccgcccccccgccccccgccgccgcttcagagagcttttctctttctttcacctattaaacttctgctctggacctcaaaaaaaaaaaaagagttttagctgtaaccacattgtaattcgtgctgaatatatgaatgctgctgttcactgaatagttaactggttatatcccttgttaatttgaagttttcttccttcgttttggaatgatagttataaggcaacatgcattttagaaaaatgcacttgtttgaacttctcagatctaatgtgactctgtgggactagatgttaagaaaccatatctttaactgaacatcatctatgatattccatctcataacatgttccatgagttttatggacaatttctaagaaatccaaagtagcatgcagttttatcaacctctctgcatccccttggcacaaggaataatttttctgttattgaggggcaaaacagaggggtaaaggcactcatacagttaaatgccagattaagtcaggcatccaagtcactctgctttgggttgattctctgagactcagctggctgacttcaaaaggacgaaatagatttcaacattggaaaagaatacagtatagaatatatgatgggtcttgttagctatctcttattttctaatccaaagagcctcctagttggaggaaaaacttgaactacataagtatatcagcaaattttcattatattttataattctttattgcattatacgtgaatatatttagcagtggtagtacgtcttggaaagtttaagaatttagacaaatatgctttttttttaaaaaaaaatagttgagttttaaatatgctgtttgggtccttatgagcatgtgggagatatataggagaaagagtttgttgctgatgttatagaatcaccaatgcagcattgcacttttgttcttttccattcattgttcttgcttacatggagcacttgcaaataggctggacgtctcagagttctgaacaatgcccttggctaaccgttagtcctaattgctgtgactaatgtgctgtgtgacctaaagacggtaacatacttaaccttggttttctcatctgtaaaatagaattgatgacctctaccaagccaaggatttcagtgaggcactcaaaaataaaaattaaaaaatacatttgggacaaacatgaaaaaaattactttttagacttaagcaatgcatttaaacctgacgaaaatgaaaggaattgaaattgtttagccacagaaaataaagaccaaggaccaatttaaacagttgaaaattatatgaagcagtgttttatggagagtagtaatgaactcttcttcaccttttttgaggctgtccaaagaagaaatgaagttagattattgcagaattacataagttagtaagcatggactgaccagttctttctaagacacatacttgagtatttattctcttcagttgcaatgaaggtgacagtgaatttgctgaatagctgtgtacatgtttccccaaagagaccactggaataaagttttgtttcttgagacagtttccattgcatttataagtcttgtcccttgaaggatgttttctggtaaacacctgtattctttttacattatatatcttcattaccgtacaagtttggttgtgagccattccaaagtctttagtatgctgtatgggtgtattctatactttataccttatttggaagtcataataatgtcaaaactatgcctagccatccccttccctgcagagtctcttttgctttgtccacttggtgtgtatattttttttttttttttttgagacagagttttactcgtcgcccaagccgcagtgcagtggcgcgatctcggctcgctgcaacttctgcctcccgggcccaagcgattctcctgccttagccccccaggtagctgagattaccggtgcccgccaccacgcccagctaatttttgtatttttagtagagacagggtttcaccatgttagccaggctggtctggaacgcctgacctcaaacggtccatccgcttcagcctcccaaagtgctgggattacaggcgtgagccaccgcgcccgtccatgtgtgtcttttttattttttgttttttgagacggagtctcgctctgtcgcccaggctggagtgcagtggtgcgatcttggctcactgcaagctccgcctcctgggttcacgccattctcctgcctcagcctcccgagtagctgggactgcaggcgcctgccaccacgttgtgtgtctttttaaaagatttccaggacttctttttcctttacaaatccaaaattgcagtagcttaataaataacaaatattttggttttatgattactgtcaaatagctcattagtaagagaaaaaaaaaaatgctgagccttaagaggggagaggaaaggcagtctttctgaagctgaatcctttgcctaaattgtcttagcaataaatcttgccacctattggtaaaaaggaagaactaaaactaaaaggtgtttgccgttctcacaggtagttagtagtgtgatcgaaatagaattctttcagcggtgcttttggataaggggcttggaaatatgtgatttgatatggaacttttccctgtgctttgaatttatcatggctcatctctaagtcataatagttttttgagtagaggaggtatgctgctctcatggtctctcttaaaattatattttttgagatagaattccattttaatagatcagtggattttaattggacacattttagaggcttgattgattttgaaaacatttttcttttttctttctttctgtctttctgcctttctttccaccacggctaactgcagtctgaacctcctgtgctcagttgatcctcccgcctcagcctcctgagtagctgggactacaggcgtgcgccaccatgcctggctaatttttctgtagagatggggtttcaccatgttgcctaggctggtctcaagtgatctgtctgcctcagcctcctaaagggctaaaattataggtgtgagccactgcacgtggccttttttttttttttttcttgagacagggtcttcctctgtcactcaggctggagtatagtggcatcaacatggctcactgtagccttgacatcttggggtcacctgatcctcctacctcagcctctggtgtagctgggactacaggctgaaaacatttttctaactctgttgttagtttgggctttccttcattccagcctctgaaatccattatttcctgcccaacgggacaggccagtggtgacgttggcctttggtgccagggcctgtttttccagatcatgggcaccatacaaagataactgccctaaacggcatcattgccccagagtcattgaatgtccttaaggtgcatttgataaaacaaaaacagttttttgttttgaaaattctcaagtatttccatactgggaaaatgttctttttttttttttgacagggtcttgctctgctgcccaggctggagtgcagtggcgggatctcaattcactgcaacctctgcatcctgggttcaagcaattctcctgcctcagctgggaccaccggcacatgccactaagcccggctaatttttgtatttttagtagagatggggttttgccatgttggccagactggtcttgaactcttgacctcaagagtgacccatctgcctcggcctccgagagtgctgggattacaggcatgagccaccatgcctggccaacaatgttctttttaatggtgttttccccactatctggatagatatatgaattcagttactaagatgacttagatttaaatataaaacactagcatagcagtttttgattcttaatattatcttaaatccacctcccctcattgtcctctgtatctaaacacccttcaattcttgagaaaattaagattaccaaagattagtaatctatttgtgattgtgtgtgttggtggacatcctaacaaatttatgaataaagccaatactgttttgttagtgtccttattttttctttacgtctgttcatatttggaattctaaggcactacccagataatcatttgataccctttgttggcatgacatgtttggtcaattgttttggcaaaattatttatccaccactgggaactaagcactgtaacaactaaagaaagaggtcatacaagggaaattggaagaactatatgttatttgtttcaatttttatgtagtacacctatatatgtgtgcaaaaaaaatgtaaactgttacaaagcaacatattgatgaatttaaatgagtagagcataataaaagcaaaaaccaaacagaagagtggttggagtgaggccataataaaccaagagatattttctgaaggaagtgaacatgtttgcattttccagcatactgctatggatgtcagcgttaggctaatacatagtattgcagcgtgattcaaaaaggtgagatagaggggaaataagatagcttcataaatattaccaaggaatttaagacatgagcattttatgtagggaggttgaaatgcattgttataatcaggctgtgtaatttccttctgtcaagacctacccatttaccagtaatgataccttctttctcttctatttttgtctcttcctttaggaaaaggaatatatgcttactcattatttaaaattcagagtcattttcctgttccagttggttttgttcctggaaccaccaaagaagagtagaattaggtgcatgtgaaacttttgtttctgctttttctactcaatcaacttttatccctttttaatttttactctctcaaccatcagttctatatcatggtatctcttcttggtctttttgtattatatttccataaaaccagatgtacggggttgttaaaatactgcctggacatattatctaccctgcactaagtggtcctatcacaaaatccagttaaacacacattgaagtatttaaattgtttcttttttaaataacatcatattgggcattggacttcttaactaaactatttctttcactaaatgacattggttaattcaacaagccattgtaggaattctgttaacccagtagcttctactactatgttactatggtaatgacttagcttcccataaagctgcatttaaataggtgtttatagtcaccaattaccaggtatttcaagtactctttgaaaggggcctgcttgtggtggggtggggggcgttaacatagatactttctcagtcacgtagccatttgaagtttttcaggtagaagacagttgatagactatttggtgagcaaatgaataactggatgaatacccatctgggaacccctaaagaactgaagatagttccctggccatcactgttcacagtcatctattatgtgcttactctatgccaagtgttgggctggattctggggtcaccaaagggaagagaaaattttcactgccttgagggtagctaaaaacttaatggagggaagctgagagcatgagcgagcgtgccaccccagctgggtgagcggcacaccttgggaacagctgggagacccccagtggtgtgtgtcttccttcgcccttagcacttgctcctctccagctcactgtgtttcttttctctctggggtctaaggagcttaggcttcactgcctgctcctcagattgtgggagcaggagcagagagtgggtgcctgccacgggacagggggtcctagagacaggccccagcatgggaaggcagtggaaacccatgcattgctctctggcattgccacacgtcttctgctgcctgccttccagccctttgcttttccccagctccgtcagctccttgcctctgacatcagtgatgaaagtcaggcgtggggggattagattatttccattggccttgatagacttagacatataatagaagctatgataagtgagttagttttccatgtttgtttactgaagtttatattaccctttatgtcaccaaaacatgcccgtttgcagtcattgccaatgtagtcatgcaaaatcacttgagtgaaatagactttggggatctaatctcaggacctaaccaccatttataaagcttttttggggaaaatgtgttctggatttcgcacagccagcttacaaatgagctttggaaacacaatccacatgtaagttggagacttcctattattagcattcagccctgcgaggagagcccttgctttgttagcaggcctatgtgtcctcagccctaagttcctaaaaccagcactacttgaggagcttgaattggtgctcttggagttctttagattagttatgagacttcagaacctgcttaccagcagtactgagctcaagaggaagcctaattcatatccttcagaagataattttaagagagtgtgtatgttttcgttttgtgaacaaaggaaagttaatctggtgctccgtgtctgttttgtaattccccaagggagaaggaaagggagggaaatgattgatttccagataggataaaaaccagtcagcacacaatgggttactgccaccgctttctgataaggatcctacttcaactatctgaagagattcttcaaggtggaggatacagtggttatattagttactctcacccttgttattatggaaggtaaaattcctggatcctagatttaattttaaaatagtaatttaataatgtctggtggaaacctcttaaaaaaaacactttgcagcacatctctggtagccctgtgcttgagatgacttttaggctgccagttcagaagatggaagatataaactgtgttgatgagttggtttttcagtggaccctgttaggttccttttttaaaaaaataataatttttataatgagtatgtcttcgtgagccctcacaacccttgaagtttttacttgtttggcagaactaagggcactgaacgtttgtaagccgttcactaacacttacaggaagggcataaaagggtgctcaagtcagtctgtaggtggtgggggcggggtggaaagaggggattcctgtaggcctggatgaatcagccactgatttctgatggtagccccagctgcaaaaaagtaggaagctttttttatggacagaactacaactcctttctttcaagtttttcagccttttcacacttttccattcttcagactttgcaagtttttaaacaaaatgtttgtatttccccaaaggaaatcacacagttgactgcattatgagagggaaaggagcaaactctgtctcatctgaggaggggctcagatcaggagttgtgtagggccctcacccggttgggggtggtggagccttggctgtgtgcaggagtgactgttcttggagatgttctggttggatcatgagtttgggcttggaaagcactgcctcaagttcatcagcaggaatgaggtagaattcactacttgctgtcttaagacctttctgtctgccaagtgtttgagcaatccctcacatctcccccttgaactaaagagcaacaactggtcaagagcccagcagggatgaaaaaggttggccccttgcatccttcatctgctgtttagactaagggccgcattgtagaccactctcggccatgctgtcctgaacccgaggatcagcagaattacaggcccaatttcaggcagacgtgagcttgcatctgatgacaggcaagtacctacatgtgtctttcattactccgctgccttaggagatgctgtttaagttggcagatatgcttatttgaaagcaaagcttgttgctggtgagattactgaatttacaaaaaaaaaaaagtggggggatcagatgccaagggagagggaagggagtgtgtagcatttaaaagtgtggtgaagccatcaagttaacaagaaaaagtagaataaaatgtggttccaatttgttgtactgggctcaagatgataatattgcaatagtaaactgtagggatgtgtgcgtgcaaatgtgattacatgtgtgcttgctttctgaatttcaaaattgtagaagttattagaagttctaattttagttcccaatttaatttactctgatagtaaattagtaattttcaagggatttactgataatcagaacaaagatttgcaatttctaggacagatccccaattttgggggtgggaaggagctactttgtatttccctgaaaccttgagttactggggccgaacatgtagggcagatattgaatgaccaatcctaatgctcttagcaactttgctaagtaaaaccccgctgccatccagtggcaattggctatacggcatggtagctgtaaaatatgcccttttctgccttttctccctcagattccacctttctcagatgctcccagttttttttcccagatggcacctgacacagtacttgacaggaaaaattgactttatgtctggcttaggtaattcagggcaagtgtgcatttatttaccttgtctcttctcctagcaatactaatttttatctacgttgcatttttattttctccccagatttgtcataacacacatactttttccttgaatatttttgttaccttagctaaagaattaatgcattgtggtatttctgcttgtcatagttttactttagagtagatttcgcttatatctttgtatttatgctttgagctgtggtttaccaatttcctagcatgtttcatgacacttatcctacatttcagacaaggatttatgtgtcccataggattcaagctggacttggagaaagagccagctagcaaatggaattattctgacttgtgaaaggttccagccttttaaaactaggctctgagaaataaaaaaacaaatattcttgggaagaaactgggtttgtgagtacttggctagaaattttaggaaaggaaagaacatttcctctggcctcgggagcacattcaatgtgaaatattgctgcctttaaaagagccaaacttaaatttctatttggatcatttacttgacttaaaaataaagggatctatttttttttaaggttcagaaccctattttaaataaaatgacattctagtaagtcaggcaagatgcccccaacatgagctattaattaaaaacagccggaacttctggaggtgttagcaagtatctactatgagcttggggattggcgaaatctggtacaagttagttccagctgcgcacatttgccttattacagttctttatgataaattaaatgcatgcttcatacatcctttggtgtagtcatattctctcagcacttgactaagcaggtggaaagcttatttagtcataggatgactgaaaacaatgaactataaacccatgtatatccactccaagaaaagagctaataaatgtcatgttttttattttcccgtggaccccctttttttttttttttttgtattttataacctttccagaatcttgagtgatttttaaatgtttgccctttggtcataaatgcagcaagtaaatgtgagtctgcacactcgaatgttgtataaatcagttgaccagtcagtgttggagcaaacttctcaggattgctctgtgaactccctgttctctggcagttgccaaatacaaagataaaccaggagagacttattcccaagaaaagaatgattctgcatccttaacttacatataaactgttgagatgtttcattgttttgtatggtcaagccccttctcttgttctctctcttcatcaattagtatggaaaattggaagtttactgaaaagagtttcgaatcatgggattttagatttgaaaaggaccagagggatcatctactcttccaacaaataaaaaataaaacccccaaaggaatgaatgatccatggctgggacattggaatctctctataaaggagaaatcatattaaggtattttcatcttaggcctctaaccccaagggtatctttacaaagactttattttagtgaagccttcaataaacagtgacctcatgtcaagaattctaaagagagggttatggaatattggtttgatattaaagtcattgttatcttggagctggcctgaatggactaataagtggcctgtcaccagttgtaacttacttttacaattttaatgtgatttaagggaagacactcttggaaatgcttagttatggttcatacccataatcgtgtttcttttaggtcttaaaattttatataatacaggggagtagattgcatcagtacagtctttttctttttttcttttttttttttatgatgcaaacaaagcagtatcttaaattaaatcaaggtttcttaaggttccagattcttattcctaaattttccactgagtaacctccaaattcttctcctgcctttgtccctagttgacacaagtcaggccacaattttttttctgcaaatggacgagctgctgctcagaggctgcacttactggtgagagatccttcaagggaaatgaatctggaatggcctggaacatttgtctttgggttgctccagggctttattagagcttctgagatttctaagtaggtgatgaaatttagcagcatctgattttctaaaatgaccaaaggagaattgtttcagtccctgatttgcaaagtactcactttttggtcctctcaaaatttttgtcagataaagatttttccgtgccatggatataagaaataacccactcttaccgataaagggaagttagtgttgtaaaggaacaaatggtgattcaggtttgggagactttggaggtattcattctccactaagctatatcccaataccatcattatctgggtcagcctccgattcagcctcatcctgtgcttcagcagtggggtaaaacaaatgtcacttgttagctgcttcttcatgaccttcatagactatgcattaatttgaagccctgcccccaaaaatagtgcttgggggggaaatgagttagtgattttgtgaagataatgggagttgaggaaaacacttaagtttgcttttctgagctctagcttcattttacttctcagtctcagtatttaattgtctccactgttttttctaacttggaaggaaatcagatggcgaaagtgaaacatacggctatcaatgtgaaaaagctgctccctatagcactggaattctcttgtcattaatagctcttgtagtcgacagattataatatacagagtcataaatgttcttgttgtcatttggaaaattacaaattcccaaaaagtggtgattatttggggctttgggtctgcaagacgtttcacattaaaatgctgataatatcttcaaaaaccacagagccatgggccttgcaggcttggtaactgactgcctttgtggtgtggttttattctttctactgaagcacctggttgaaaggagtgggatgctgaattcataggggcgtgttcacaaaaatctttaacatcaagtatctgtttattcaaaatagtgcatagttcaaagcaaccttgattccttaaactagatgtttttctgttctttaatgaaaacagcctgaacgtggttattaatctgagtctttctccattctgaccaccccactctgtttttctctttgaatatcaaaaaaaaagtataaaaacattttgtaattttttatttatttatttttgttgagacggagtctcgctctgtcgcacagggtggagtgcaatggcgcagtctcggctcactgcaagctccacctctcaggttcacaccattctcctgcctcagccttccgagtagctgggactacaggtgcccgccaccacgcccagctaatctttttgtatttttagtagagacagggtttcaccgtgttcaccaggagggtctcgatctcctgaccttgtgatccgcccgcctcggcctcccaaagtgctgggattacaggtgtgagccaccgcacccagcaacattttgtaattttttaaagggctacataaattcaaggtattattgctgtacttcttttctgttaccttatgaagttgattgttgttgaagcaccaacagtatgcatacatgggtatccagaatgaccatctagtctcagttgtgcaaaattcactatgtagtctcatggattgagaggggcaattagcaagagtgtgagataatggagaacaaaaaataatgccaagctgggttaaaaaaaaaaaagtttgggaaagaaaaaacaagtgctcaagacaagcctcctatttttcagtttggcctagccctagccctattgaagaaggttagtacattcacctggccagttttagctaacttggttacctggcaagtggcggggatgcagtacattagtacttgtcctgtggtacagagcatgtgtctcagggtgtggccactccagggagagggaagacgtgctttatggggcctcctcagccatcactgtgatatgtgccaccaggaacccaggacctttcatggtccagtctgaggtgggagcaccacagaagcaagagctgcctggcccagccaagcccagattaccctaaaatcttactgcttttttcccttcagcattttaaattataggagcaagtaaaagtgtacataacgcaaggcaatctgaacaggtggctgatagctgctccatccagaggaagagccatgaagttcccccgacccacacatttcaccctgtcttgtctaccaaaaatcacatgaaaatgcagacataaccatggaggagtaacccatgaacaaagggctggtaattacagtttaatgctgttctttttacccctttggctggctggctgtgcaaaggcaggccccggtaattacggtttaatgttgttctttttacccctttggctggctggctgtgcaaaggcaggccccacaggggagtaatgtatttgtgacagccagttggggtggggagagatgggctgtactacactttgaatttattatgttctgctaatacttttactcctatgctggaaagttatgttttccttcctttgttagacaatttttgcagagtagtttaacattttcaaacatttactatatatagcacttttaaaatccaggaactgtcatttccaaagaagattccatgtctataatattaattccctgtcctctcctcattgcctttttcagacatccactgtagatagcctctgttccccaggaactaacatttccaaaggaaactcccttgcctataattccctgttatcttcttgttgcctctcctgaataataatttttgattcagtaccttttagctatttataatgttatcgtataatctgagtttgggaactgcttgccacttccagtttctgacacccaaaacacattttatgcttagagaaaacaatagcaccctgactttttagaagacatagttttcccttggggatccaaactggaagcagatatttgagctgtgaacacattttttcttagaagagtcaattaggagctgggttgaagcttcagtctatgcacttagagtcaggttttaggaccaagagcaagcactgtgggcacctgttgtaagaaaacatctgacagcacgaggtgctaaattgcttcaaaatcctccatagctcgtggggatgctacctttttagtaggagtttgaagcccagaatgcactttatattataaccaacacagttgaaaaataggttccatgttctataagaatggattcattaaactgcatgttctggaaaaaggatgtattagagactttgaatttgaggatcctgtgttatatacatctctgagccatcttatcaggaagaaaagcagctccttaaggtgcctgcctcttcctctaatactatgtacatatttcgacctctgccctctttaagttattttcatttgtcttgtagccagtatcagacatgttaatgaccactaactttgtaaatgaaattattgcagctcataatgtcaagatgtgaacctaagcaggccttaggttttctgacttaatagccgaaccataccagtctttccctgatcattgaaccttctgtcttctgcagtcagcagaccgtctctaatgagaggtgcacagacacttttgatgcttattttaagggaagccagtggcagatggagagccatcagatgaaactgttattaatcacaccatttctgaagctgttctgactccacaccctgcattgtgacaaacgccaggatgccaagttcctagtattgcagcaggttcttagtacataacaaacactatcagtgcccccagctcaacttcgactaaatgccttccaatagagttaagctgtttttatctaatacatgctaacagtaaaaggacacagaccctcttatttgaccctcttagcatctaaggaatatgatactttttttctttatacttagctgtgtattcaaagctaacacattctctaagtaaccaagttcacactaaagaaaaattgaaggccatcctctaaagccatgctgctcagtgcaggagccaccagccacatggtcaaagccacacagagccactgaaaggtggctgctataaattgagatgtgttatgagcataaaacaagagagaaatgaagactatctgcttaataatttttatattgattatatgttgattatattttggatatgtggggttaaataaaagattaaatttcaccttttgtttttgcttgtgatgtggctactagaaaatgtaaaattacatgtgtggcttacagcgagaccccactatttacagggcactgaaagtcattcttcctcttaattcctcatctaaactctactcattgactattttgtgtatctgcatcttttcttccaaaatgaatgatcagctgctagaaggcatgactatggaaacagtgtatcttctactgtgatttttcaagagtgaggaagtttggctatcaccatgggcgtgaggagaggggttctgttctcatttggtaaacatacaccagatatgctaaacatcccatagaatatcttagacaaagaaaattacagtaagtagagaaatggatcaaagagtggctattcttggactctctactttccaggtctttttggctagagaactctttttctaactttgttgcctggctcttggcagtcaatgtccaaagtagtgcattgagctgccccccaaaaggggcacagtttgtaaggaaaccatatgccctatgggacctcatgggatgacactcagttagtacataaggatctcttggaagggagctgcctttatgtcctctaaaccaggtcatctcttatcagttaaatcctggtgctgactagtacagctatatgagcctggacaaatcacttctgagcctgtttttcctctctgtacaatgacaatgatgatagaacctttcttataatgttatgaaagattatattttctgagataattttagtaaagcaacgtagcatagagcctgatacatgttaagtacgttgtgtatattggccatgattattattggcttcttggtaatgaaagcatcaaatactaagggcagcttttagtatattatttctgatcttgtgtgatcagaaataccacatttttgagaatgtattattttccaaagaattaaatgactctcagaggggaatggataaacccacagaggttctggaaatggagcagtttcctgtaagtatcatgacttccaattaagcccctttgtctgttttatccctgtcacttgtactcactgtgtagatcatgagctaattttgcttggactctcccctcccgccatctcttagagcccagcagtgctgtgcatgcatgggttaaaaatttcaaactgtccaaatgaattgcatttattggcaatttaatgctgaaactcaaagagggaaaagaggagaaaaaaaatcaaagatgaagtggaaagacaagggcccttggatgcagccggacagaggttgtaatatctgctctgccaaacactagttaagtgatcttggtgtagtcaccaaacctcttgagtctctttcccacatacaaaatgaggttgatgtgtttcacaaggctgttatcatgactcaaggaaataacctaaatgactagggcagtgacagttcacctctctctcttcatattgctctcaatttcatgatcttcttctccccgcaaccccatgatttatagaagccaaattacgttctctgatttatagctgttgtaactttggaatacatttaagaacatggaattagttgtcttttgttagatccacatacagaagtcacagaaatgttttcatcattttgaattttactgttcattctggcaaagtgaaaatgtataccaaaacactattttaaaccacctatcccctgggttagaaattataagttagtgtagcccagtgaagtataattaaatgttgccattctcccatttatttaacttccttccctccatatttgaagtaattttcgcttggtgccaactccagtcattctccagatgcctgtgatttcttccagattttcaacacacagtggctaaagataatatagaattattttttaagtaatttgtgattaaatgtaaatttagtaattttatgttgggacatgtgatctccttgacattttctccaaaacacagaatttaagcactagaaatgattttaggacatctagttaaaccattaccacttcactgttatgacagtgaggcctggagacattaaatgttttgcccaaagttaccaacatgttgttggcagaaaaatctggaacatatggcctcatctattgtctaaattttttctactagtgcacagtgccttttcaattgctttttatttgataatagtgacaatcataaataggggatttaatcaatactcttttaaaaaaaaaagtcacagaaagaaagcaattgtattgaaaacccctttctagtttttccagtaggttacattaaatggccccaaaaagtaatttatgggctaaaatgaatgtcttcagaaggctaacataaaagatgaccaacagggggaaacctgaaacagccttttaggtaatttgcttaacttctagcccttttaaaaaaattactcaagctcatgttagagccaacaaaaaacatctgttgttttatttatagccacaatttctaagaagcatattctatagcagatgaaaaagtagttgacagcttataattcataaagttactgaggcctaatctgatagaacaaaatgtacaaactccctcccgtggttcagaccctatcccttccctttctgctgaagacagaaatggtgcaacagaggagtggagcataggttattacggttgttaaggaagaggcgactctgagatgataatgcagaaaggagtaccccgcagtgataaatgattgctttcacctctgggccatccaccagcctgagtcactgctactttttcattaacattgtatggactttcattataggaagccaacattttgctgtgttcaatctacagattgttaacagcgtatttccatcaggaatctaaagtgttaattaaaacgactgattgaatagttccctctctgagggaagcttttagtttgccccttcctttcaccagttagctgtagtctatattgacataactttctccctgctgactcttaagcaattattagaattcactcattactcaaatatcacctctctgtatctgttggcttatttctgagaatctttttgagaacatgaccaggcttctttctataatttttatatatatatatatatacacacacgcacacacacacatacactacatatatatgtatgtagaatacatatatatatctatatatgtacatatatatctatatgtatacatatatctatatatgtatacatatagatacatagctatatagatacatatctaatgtatacatgtatacacatgtacctacatgtatacacatgtatctgcatgtatacacatgtatacacatgtagatgcatgtatacacatgtatacacatgtatctgcatgtatacacatgtagatacatgtatctgcatgtatacacatgtagatgcatgtagatgcatgtatacatatatacatgtagatgcatgtagatacatgtatacatatatacatgtagatgcatgtagatacatgtatacgtagatacatgtatacatgtagatacatgtagatacatgtatacatgtagatacatgtagatacatgtatacatgtagatacatgtagatacatgtatacatatatacatgtagatacatgtagatacatgtatacatatatacatgtagatacatgtagatacatgtatacatatatacatgtagatacatgtagatacatgtatacatatatacatgtagatacatgtagatacatgtatacatatatacatgtagatacatgtagatacatgtatacatatatacatgtagatacatgtatatagatacatacatagatatatagatacatagatacatatatatttatatatgtacatatatctacatatatatctatatatacatatatctacatatatatctatatatatatttctacatatatatctatatatgtagaaatatatatatattctacattttagttctgctatatctatagggccttctgtatatcacagttttgtgtgttgttgtttttttttaagtgcattggtttggcacaaataactatagtactatttattatcctgagcttttttgagaatgtagtgatagggttcaacatctgcccaaattgacccatctaaaattataattctaaaaccataaccagaagaagcccattaatttctttagtagagaggtgagtagcctcttgtttatttcactactgatcatagtctattgtgagatatgaagatgtattagcccaccagaattaatcacctttgtctgaagtagtgaaagtatattgcttcattttgttaaactctgattccttacacaattgttaaggattgtgtttacttttatctcaaaattgttaccttttaatatatatagtcttatatcagtgatcttttcaaacttttaaaatgaagtctgaataaatattattttcttatgcatttcttctgcaccagctgatagggaattttctgtacaatgttttcaggcctcttgcctttcttgcctttatttttctctgcaattccacacacaggtcattgctttcccttcctctccctttttgatcatggatgcttcaactcccttcatatatttgttaagcatattttactaagatttcattttgtgatgcttgcaaatatacattacaaaatatatatttttaaaaagtgatttgaagggccctctgtccatctgatgattaactagaagagtcttttgtaccttgctaaaagtgataagttagccagctatatttagctggataaaacccattacatccttggggaagaatgtgctttgtttagctttatgagaaaatatttaataaatgctgtcttgaaaatatttagcctggctgagtgagctggcaaggcttcaatactgataaagcagaggtgatggtgaaaagctggcctgccagtccaagctcaagttaaaaaaatgcacctcttgtcactaagggttgcaactgtcgccaagtgcttgtccatcagtgtcacgtaaagattttttaacctcacatatggcatcatgcagtttgtctgcctaaaaaggcaacctagattcacagagtggttacaattggctttgaagtcccatctgttctgtaaaatcctagctttatttcttactgctggtatgactttaggtaacttgtttaatttttcttaatctcagttttctcatctgtaaaatggggacagtgataatttcttagagcgttgtacagattaaatgagattaaacgctgagcagagtttcttacactaagtgttcactacatgggaattaatcagcagtagtagtgatttgtaatcagcctaacattttctgtccctccctaactcctcccaccccacaggagatacaaagagcaaagtcctcttgaatgtggcgaggtaggaaaggctctggcatgggcatcaggaggcctgggtcctcggcttgaacttcctgtgggaccttgggcaagttgtggctcacataatccctccccactcatcagtacacagtgcacagggcagcagagctcctggctgctagtctctcttttgatacctaattcgttgtggtatcagaccaaatttgatatgatagctagacccgccggtccgtcagtatcatttggggtctggtgtaagatcagcctgtgaaactcaggcatgtaggcaacaagttatcagtaagaaggtcaatcattgggattctgtctcccacaatggtctggattttctctctgtggctggtgggctcagccccaatccttgctactcaaagtgtgattgtggtccgaggaccggcagcatgggcatcacctgggagcctgttggaaatgcagaatcccagactgcaccccgacctcctgaatcaggctgttaatatgtacattaaagttggggaaccactgcctcaaactactgcccttgggaatattctgacacgcagagggtatttatttactaaatacttacagaatttgtgtttgacattgacattttctagacaaggttccattcctctctttgggtgtagtgtactgatgtgttaggtcagggttaccataacaaaacaccacagactggtgtttatgtctgtaccaccatagacatttagaaatctatttctcacagggtgccagtgtggttgggttctggtgagggccttctccctagcctccaggctgccaccttgtcactgtgatctcacatgggaagggtggggagaaaggtctctggtgctgcttcttataaaggcactaatcccatcgtgagagcacttgccctcatgacttcctgtaaactcagctgcctcccaaaggcccatctccaaatattatcacattgagggtcagggcgtcaacatgaatctggggggaagggacacaattcagtctgtagcaactgacttccacatctgactttaaaatgcatctttaaaaaaaatgtgctggcagataaatatgtaaataaagcaaatatgaaaatgttaatcgtagaatctaggtgaaagataatgtgggcgttcactaaacaattctttcaacttttcaggatatttaaaaatgtcagagaaaaaaccccctactctctatagttatttaaaaggaatctggtgctgcttttttctccttatttccatccaggctttcttaagagtgcttgttcggtctggctggacaaacttgcctttttggcagtttctctctctctacccactcactttctccttggtcagccagtggcctgcttctgcactgtcagtgaggtcccagcctggatccaaagcttctttctggtctctagtctgccagtagcatctttctgtccagttcctctccatccccctgccctctcctaatactaatcaggggatccttcaattgcttgtgacatcgcagcttctcaagttacattttacaactctgctttattatttttaagcatttctaacatgacattttataagtttgactctgaaatttatcatcacatgtaagtaggaaagaagtgtctccacaagtttgccctcagccagagatagtgtggttcatctggaatgcccctgcctttctctggttattaataggggctcctattgcttttccatttacagtgttaattatctgcatttcaaagtagttcataatgagagggaatatattaacttgttatttggggaggaagtacaaaaactgctattatcaagatcatttaacttgagcataatcagaaagtattaaggttattcccttgtgggattgaccatcagatatctgtgtgtttcataacacccttattgcagataccttttaaagaagggaggcttgcaggaagtgttgggaaacttactataagcttctttccttgactggcacttgtatactctggcgcagggaagacaagcccaaactaaatacataggcattacttaagagctttgtgacattggacaaatagtttccttgcctttaaactggggataatagagactatacacctttgaactgctatgaaaaataaatgaaaatatttctgtaaaatacttactgtgggaatgtggctcctagttgatgttcagtactaatcattcattcagcaaacagcctaccgcccactgtgtgtcatggcctgtgatttgtcttttttctttttgggggcttctgggtcatacttcgtatgaaatctttcttagcacaccgaaagaccaactttccttataaatcattggcttcaaaaatcctgtggactcaggtataaattatttttctggtgaggagaggaggaaatccctttcttccccatttacatcctgcctagctattttaatttgctgtacaccgtaaattgtaatcttagaatcaaactccaatttaggtgataaggatcacaattaattaggctagcctgtcaaagattaaatgtaatcttgcatttcagttacctcctaactctgaggctttagctaagcccgtcagaaacaaagctgttaggtctgcttaggtttaataagatctttgcctgctgtttgttttctataccagtctgttgtctagaaataaaacgaatggacagaggatctcaattccctttcatttgtttttagctgtgcagcaggagagataaatgagagaagataaacttaacgatattaaagactaattaggatatctgaggagatttgcaaacttctagtttaaatctgtcggcaactcttttaattccctcctgctagttatctctgaaaataatgtagttatggctgaagatttatttccacatctactctttgtactctcattttcagttgcgcatactttttttctccttcttcctccaaaaaaaaaagctcttgtttcggccacactcaatataatttagcacacagtcattccaacttcattttgtcttcacattcagaaaactgaagtctaatatctcaaatatattagtattgtggtccttttggggaaagtatgataaattgaaaatattttggttttgacttctgaagattttgagtattgtttatatatacaaaggcaaaatgcaaatatatacaaggcaaaatgcaaatgtgcttccagcttgcttccttagaaaagtattgagaacagtctaagtatgataatttctggtcttaaaacctgcaattgcaatcgggtatttccataatctaaacaataataaagattacatgactaattctaacaataataactacctattagtttgtgctttctacatactgggcacgatgcctgtcatgtttatatatatatattatttaatccttattactgcacataattactcccattttacagatgaataaatgggattcaagttaactaacttgcccaagactactgaattcagtaagtggcaaagcaaggattaaaacctaagcctctttggctttaaagctctgcttctaatcacttttttactactgattaaacagatgtgtcccaaaattaaggaagtcatcgttgttttttttgctttgtttttgcttagtcaaagagcacaggccatcatttgttgtagtgtcacccgtaaagcttaataagtttaaagttcagggtgttaatcattacaagcataaagtatgaatatgctttaaaggtttatttaagaaaagaattgggattagatttgcccaccagaatatacatttttcacttgaagtcctgagagagattcagacagaaacagctttgactcagcagcagttagcagacaaacatcttgatataatactgatccacactttgcatatacactttcttttctttgtattacatttttagaggtaagtggcagtttttcacacacttccaaactgcttccatcagtaatgaaatatttggcttgggcagcctctggagtcccagtgtttcagcttaaactttccagtgggccctgccaggcactaacttcaaaatatctttttttatggtgaatgcctccagaaggtgcaactgtgtggtggtttcattttgcacttcataacggtgttggcatcacttaatgcaaagaatgccactgtctcccacacaccgctggtgcccaaggactgtcgaggcctgtccatgttagtggtttgggaagggctgaagtttggagagaaggctctttttctattccatgtgattggctgtcaccagggcaaagggggaaaactagaacgagtggaaaatgcagcatcggatgtgtcatcaaatattcttcctacaacctgggacacctagttcattggtgttctggtcaacattgaaggctgaatcctcctttcttttgaaataatgcgtgtcttggattcactacttttaaacctttctgctgatctttatccttttcttcctaagcaatactgatttctttcaatgaaaaatgatttagctagtgaaaaactgggattgggttgtagtaaaggaatcaacaaatttgcccagattcttaagagtggagttggttctccacacttatacactgtgctacagcaagcttcacaaccaaaacccattacttattcaggtataaaaatcaaaagctgaactgtaatgagaatttaaatgtaaactgttggaggatggtgctctgttaatttgtgtttgctccataccccaccctatataattgataatatttgcatctttttgtttttagtactattattttttggtttatcaaactttgtaacatggtgctttattgtggacttttcaaagaacaccttgccaaatttggtaattcctagcaattgtcatttcctgttggaatttcttaaagtggaatctaatggaaaagtaattcttgaccttgtgtatttagtaaaattaaaggcatagttgattttaggattgtcataaaaattaatattttgttttaaaagactttttagactttcaatgctaattgatcctattgttggaagtagatgatataaactttaaagctttttgggtagaactttcacattcaccatgtctaaatattttaaagaggaaatggattgactcgcagacattttgtactaaggaatagaaaatctttgaattgctatttaaaaaaaaaaaaatccctgtaaaatttaccattttaaactccagttgcaaaatcctgatcagctatgatgattcatacatttgagcgataaagcttttttcaatattacaaattcagtggggagtcactcaatacattacaaaaagagtacttacacttcctagtacccatgtgtatttttttttctttttaaagcaatctggtgtgccttttgagaaaagttccagtgttctcacagatcctgacttggtgtagcacagtgcttttcagaaacttggtccaacacctgaatgagtaatgtgtaaaacatataatgttttgtagctcaggatactgcaggtaaactaacactttttgccgaaaaaacattgaaaagacaaaggaaagcaaggaagttttgcttttttaaaaaattttttcaagcttaatgaagaaagagctggaaatccttttgtatggagcatttgccagcccagcaatataacaacttttgggtgcatatttcaatcacaattagatgaaatctttaattatcatttaatttgactttcatatttgcctgcagaaatgattgtgttgataagactctggaatgagacaaacctttattaagtaattccattttcagagccaacattaaagttttttttaattaaaaaaatgcctgtgtaatttatgagaaaaggggaagaggaattggcatgttggttgcatgagagttgcatggatatgtatttactatttaatctttagctttttgagatttggggtgtgctaagtcttgttagtttgaggggcctaaggagtgacacaataatggatcttaataaataacacttttctacatcatttctctacctttatatttcccttctattatatatgctgacaggatgatatttcattgtattcagtgtagaaggtgtttgtgagagaggatacttttgtgagttgatattaaggcaaagggaagtggtttataatttatcagaggaaatgaaatggtgtgctctttcattttataatatttcttttaaaattttataatgcttttaattggactgtgaaacctttaagacatttgtatttgaagtgcttttcagatatatttacattttaacatacagggatttgagagatgtcattgctggattttttcataggatcacccacatgaattttcttatcaaaagagtatgtcctaaagcttatttctaaccccaaacaggttactagcccattcctggatgttccgattctgaagatttagggtggtacctgggaatcagtatttctagcacgtcctccaggtggtgcttagctctggcaagtgtgggagagaccagagagaggtgaagttcccacccagccctctgcacagtgactggaaagttaatggccagtcgtttgtgcttctatgaaacctaagatgtgttacagtgatgttgcagtaggacaaagtcactcaggaaatcgagtggtaaacattgcagggctttgagttcaaatattgattagctctatgttaagatgccttgtcttcagggatagctttagagtgggatctctaacacaaagctgactcgggaatctttcatctgccattgacaaaatttgcccttgtgcaggcaagtaagactatactctctaattttatgggcactagccacctatggttgtttccatttaaatcagttaaaataaaaaattcagttcttcactgggaatggctgcattttactcaataaccgctgtggctagtcattgctttatcagagagcacagctgtagaacatttccatcatcacagaaagctctaatagtgctactgtaggattttccctcataatatagctcttctctttttatcctgggtagttgcaatggctaatagaattaggtggaaagatcatgcatccatctatgtactgcacattgcatactgaaatctgaaagaatgtttttgcaaaatgacttaatcatacttctctgagatcaaaatttaataacattactttcataacgtgaatttgttctatgttgacttttagtacttgaaatacaggcttaattaaaaatttgttggccaggtgcagtggctcacacctgtaatcccagcattttgagagattgaggtgggtggattgcttgagtccatgagttcgagaccagcctgggcaatatggcaaaaccccgtctctactaaaaatatacaaaaaattagctgggagtgatgctgtgcactgtagtcgcagctactcaggaggctggggggggaggatcacatgaactcaggaagttgaggctgcagcgagccatgatcacgccactacactccagcctgggtgacagagcgagaccctgtctcaaaaaaaaaaaaaaaaaagaaaaaggaaatttgtttaccatagtatatggcttctaataaagagctatactggtaaaatctcacagaaacaaaattgcaaatatttagtctttctcagattatataaattattcctagaaaagactgcaagcaatgaggctaataaacaggttgtacttatattttcataatgactttaatttacctttattttgcagtttcacaaatttaagatgaatatatttagctccctcttctggcataatttgagaatttttttgcttacaatggtcttatttattttttttggactgagaataaggttatcaatgtaatgttgaagaatgttatttatgagtgtcatccagttagattttttggtatcattgtaaatggttaaaacgcatgcaaaaagtttacgaaaacaccacattttaaaaactactaattgaccaaaaaatacataaacaaaggctttgacaaagttatacagaaatttattttgatatcaagtgggcagtgatcattcatattggcttctggatctgagactcagcccatacctggcatttgtgaggcttggggcaagaatgcaaaaagaggcccaagtaccctgtgcctaagtatttttgttataaatcatgtcaactgttcaataaaatctgtcccatcctttctaggcagttatttcttcctaatgaccaggaggagagatctgaattcaggttcttgggctcctgagagttctgccctagagtgtggtattatggggagagctggatcctggttcatccctggcttctccctgcacatccaaactcccatccatcctgccactccccccacctttggggcccaggggtgtacctagacaggggggtttgtcctggggagggtggacctgggggaaaggccataagaggccatttagcaggaaatcctggagcattactctgagtagaccctaggtgagaagcagtgggcatatcactttggcctggaaagtgcaaaagcccagagcaggggttcttcttgctcgggcctgatgtaattaaattattttgtacgtccttcattgtggtctaatgcattcaactatccaaattaaatacaatggtgggattttgttgtttgcagctttgactctcccggatcttgcagagcagtttgcccctcctgacattgccccgcctcttcttatcaagctcgtggaagccattgaaaagaaaggtaaccagactgctagagggcatcagttcctttgttctacccttatttcatggctcttattatttgtctcttgtgcattcattaagtaaatttcctactaccagctatgtccagatactctgctggacactcaaactgtttggggctaagtactgggaaaaatgtctcagtctataatttctaactctagattatcatgtagtttccatatggaaactattaaattcttcataatttaataaatatgattaactttcttcttagaggccagatggttttgccaaaattatcaacatgccaggtaagattaatagtaggagttgacttccaagaatatttggtacacatctagaacagatactggatggaaactggaatgtctctggcagcagcctcacaggttctccagagagctgtgttttgcatacatggtctgtggtctgttttgtgtcctaggtctggaatgttcaactctatacagaacacagagctccagcaacctggcagaattacgacagcttcttgattgtggtgagtgtcacagagctagaaatgcaaatgggaaagacaggtcttggctttctgtttcaggtaatgcacacacacaaaattgaatttaatctatgcagtgttctaaatttaaagggaactcaaatcatgtacagttctccctgccctgttatggtaacagtgcaaacctttgaaatttttctcctgagttgggctgcaagtgtgtgcacgcctccctgcaggcatgttggtcatcatcatagccatcaggccctgggtcctgcagaggagagaaaccacctcttggtgtttctctcgctctgtgtatctaccatctttccttgaccctgaatttggctacatctaattcatctgaatcaattaaaaaatatttttaagcctatgtcacttaagaaatgtctcttctgacatcctttttcttttattacctttcccttccattttccttttccgtttccctttctttctggcttgccttctttctttttttgtgttgagtgcattaagtaacatcacgatattgttatgttcagtggtgtgctgataaaccaactctctaggaagaaaaaggccctggtttgtagcatctgcccatttttgtggcatgaatattcccaccggggcttatttcaagctaaccaacatgatgtcactggatgtggaattgggaagaattgaggacagtttgttaaataacactaattaatttagccaagagggctttagtaccccaaacacccactccctcctttggcatagatgaaaaactacaaatcaatttacttgccagcattccagcaagtcatcttcttataaatctttcaagatccttcattccctcataacgcttaaaaaaattatatactgcctcacatcattttaactgaaattaggtgtttaagccaaaaagagtgaaactcagttttggactccgtcagaggtataattgtacaaagaatgcccacatgacagtaaatgagaatttgaagcatgaggcagtttcaaaatgaggcaacttctgagacttttagaaaagaggtttttttggagaaaaggaggagactagacctttatcagtatcagtaaattcttacacttgaaatgttctgaccagatgtttcaaaagttaaaaaaatgtttaactccatttttcctttgtacatggaaatcagttgcatgcgaacagagcatatcctctttgctgctctgcctcctgcacttcccacagagcaggtcattagaagttaacatgcagaacactcaaggtgaaaaggcttgtttttcggtgtttctgacagctttatcagggctttaaggaaacgctgaattttgtccttagccaattgaaatgaagacacatgtttgggtcagaaaattggtcaaattatgaacacgtttagtcacaggaagagtttagacatcagagcccgatgaagtggaagttatttgagaaatagtggttaggtttataatgtgatcaacacaaaatgatgcagtttagttatttaaaaaaaaaaaaaaactcttcacaccactcgtgagatagagtcaacaaccaagattcacgtcaatggtacattttgaccaacaggtttccttccccagtgagatcaaaacacatagaaaactggtttcatttggagtctgtgctaaaaaaaagtgaaatttgtgccccaccccaaaaaatataaataaataaatgatgtccaaacttgggagtggatctgccagatctgtttccaactcaaagatttttcaatacataaaaacattgtataatatcctggaggaagctccaaaatagtcacttacacctaaaaaaaaaaattatggcttttaactaaccttgtgaattaccagtctttgaaaaggacagacatggcagacaatagcccacttttattagcacctgttatgctagttcatccatacattaactttgtgatgtatgtcctagtaactttaactcaccagaaaagaaagctgaccctcaggtaaataatttctttcacatttttcagtgccttagtggctaatttttctgactccaaaagtccttgatttttttctcttttttaattttgccctaaaatgaattgtttctttgtctcatgcaagttttaatgattcagattttcacctgacagtttttggtttcatttaacctaattcaggctttcttagccttggtactattgacattttaggctggataattctttgctggaagagtgggagcttgtcccgtgcattgtgggaagcttagccacatccctaacctctacccatgaggtgccagcagcattctcccccagttgtgacaatcagaaatgtctccagacattgccagatggctcatggcagagggcaggatcccactcccactgggaaccactaacctagggagagacctaaggaagaggagactccattccagggggagggagggaggagtgaagggttggagagtttactgggtacctgtcatgagtagactcagtgaaaagtgaggtaggagagaatgcaaacacctccaacccagacctaaagattatgtagctcttcaaaagtcatcgcatgacaggtaggaatagctaatggaagagcacgttaggccagtttcaatgcagaaaaggattcttagagagcagaagtcagataaatagaacagactttgtcactagctctagtagaatttgacataaggtaaggttacccaaagacctgcataggataattttattcatatactatgaaagttcttttgatatacctcatgtgttggaaaagggctttgatgaattaacttcacttgtggattgagccttctagttcaatccacaaacatttaacacgttgtatgtgctggacactgagggatgccagaagagcaggtgacagccacagtccctgcccttgacgtacctcggtctagtagggaaacacataatcccacactatgattatactccttgggaagtgtcttgttagaggggtggctcattagcactgcagaagcacagagggaaaccctgcctgagggagggatgtgtgcatatttattatcttaacgtttatactgcatcaccaaatgttttatcacatattttaggataagcaaattcggtaatattaattttccgggcagagagacattagatgaaacatgcggggcaaagtgtatgggaaaccagaagcacggccaagagtggtgaccatagagaattcctatagcagcacacacacaattttatttgacagtatttaattatgctcacaattgcattaccttcaacgtagatcctttatgcagaggatctactacagtggtattgcccctcccacacttgttaaacatgtgatatgtctctggttggttgtttgtaggacatttaagtgatttaacacttcgcctcttcaccttttaaatttaataattcttttcctcaagttgacctatccatatcctattccagacctacttttcttagagctgtgtggttgtgtgactcactttcggaacgtcggcctacctagtggggcaagtttggtttatgatgatatgtccaaggaatttttgtagtcttaggctcaacctagaatgatttgtactgtcatattccattcaaggttatctaggatactaccttctcccactcatttatactcaaacactttgcagtaaactttcatacttcctcattctctcctaggccacagcccaatgcagtcaatcaccgagttatatgaggtctcgataatattttgtacatttctaactgcattagaattcagacccccatcaccttgattcagagaactaaatctggtagttttacttctagcagcactcccttccaatttattcttaacactgtcattagtaaagctgttacaaacgtagtatcttgcccatcagcccacctttgctccactgagtacacaagtccccagattactttcctcaagttatccttcgcattgctagtgtacatccttcagcagcagccaaagtcctctccttttctagaggcccatggtcacccctgcccccagatctttgtttctagcatccctttcttctgctgggcattgtgtctttttccaacccaagtacttagagtgccatgcgtagtgagtgcctggagggtggtattgattagttttacccccattattggattgcttgacctgtttcccagctgagggatttactggacaggtatgctcatcttattttctgagattgtctgatatccacaggttagattagtaatactcagacagaattagggagaaacattctaaaaatgttcaaattattttcatggatattcttgagattggttgctaaaagtctgtagtatcttactgttgaatccatcactctgttggtgacatttacatgaattctgagacatatcaactcaagtcttaggaaatctgggaatatgcatttttaaatttttcctgttgaggttttaggaaacatttactatatgactaaccattcctagttagaacccttttcagtcagggcagaaccaccctcagaggatgttaggaaatgtttgggttctgtattcgtttgctcaggcagttataacaagttaccacagactgcgtggcttaaaacgcagaaacttggccaggcacagtggctcacacctgtaatcccagcactttgggaggctgaggcgggtggatcacgaggtcaggagtttgagaccagcctgaccaacatgatgaaaccctgtctctactaaaaatacaaaaattagccaggcgtggtggtacacacctgtaatcccacctactcaggaggctgaggcaggagaatcgcttgaacccgggaggtgaaggttgcagtgagccgagatcacaccagagatgcactccagccttggctacagagtgagactccatctcaaaaagcagaaacttacttctcgtggttctggaggctagaagtccgagaaaaaagcatgtttggtttcccctgaggcttctgtccttggcttgtagatggtcacctgctcactgcatcctcacagcgtttctcctctgtgcctgtgcatccctagtgtgtctctctctgtgtcctcatttcccctcctagaaggatatcagttacattggattagagtccactctaatggcctcattttaacttacatgcagtcactttctgaggcattaggagtttgggcttagaggggtgggacagaggatggggtaggtaaccactgaagatgcagcccaattcagcccataacaaaggcattattttttgttgccccaaagtgtggaggtctgctactggcatcatgggcagggggtcaggcatcctaagtgcttgcaatatgtcagagagacctccacaggaaaaattgttctaccccaaatgcccggagcaacccctacaagaagtacggctaacgaatactttgtgtcttgtatttatcctcatattgcttccttatttttttttttttttgtcacatgtgagtcaaattgttcagaaaattagcccaactgatgtattctataaaataaatgtctgaaatatttcttaaattgtttcctagatacaccctccgtggacttggaaatgatcgatgtgcacgttttggctgacgctttcaaacgctatctcctggacttaccaaatcctgtcattccagcagccgtttacagtgaaatgatttctttagctccaggtttgttttttctcttctgggaacctcattgaacatacatggagatgtagaggtgcttgtatatgtcttgcatatatagaaatagtggttagaaaatagtagtaataacctgtccctcccccaacaataccacctcaaatttcctcctccacccaagcatccaagagaagacccagattctcatttgcttgggaagcccgtctgcatgtcagaatcagaaatggctcattgttaacctattggtcttaacaaagtttgtacgtcaatgaaggacacggtcttccaagtactagtgtcagattcaaggaactgggactagaatccagtgatgggggatgttcttgtcatctttcctgagtggccataacagaatgtgttgagggaagatggctctcagttttaggagataaggttcagttaagtgctttggggacaggaaactggttcgtaaccttcaaagttaaaacctgtgatacttatctgatgctcctctgagttagccaatcacacttgaagctgctcaatactgggtaagttgctgccagcacaccctgaacagcttgtggtttctttacacactgagctttttgcatttccatttgacctgagatttctactttctcataatgcgttttctaatgagaaggacaaatgtactgtgtgcttctcccaacaactttttaaatgactcctatagcttgaagaaagagcagaacttttctaggtgtttattcactgatacctggaagtagtcgcttactcatttctctttttttttttttttaaacttgtagaagtacaaagctccgaagaatatattcagctattgaagaagcttattaggtcgcctagcatacctcatcagtattggcttacgcttcagtatttgttaaaacatttcttcaagctctctcaaacctccagcaaaaatctgttgaatgcaagagtactctctgaaattttcagccctatgcttttcagattctcagcagccaggtaagtgaaaggagacaaacatgtattttggggtgatgagggtagtcctaaatggattggtcatgaaaatgtattctgaatatactactccagagatgcatgtgcagatgctatcacacacattcacttgagtgtatataaatgaaaatgagtttgcttttagggaaaaggtttctaataaactctctttcttacagctctgataatactgaaaacctcataaaagttatagaaattttaatctcaactgaatggaatgaacgacagcctgcaccaggtaatgctttttgagcatttaacattctctcattgttcattttttagagccttaaaaaatgatggctataaacctcctttgaagtaacacagcttcttatggaattacagttggtagtaatatgttaccttgtgatttaaagaaaaaatagctgagtggtagtgtatatgttaattattatccgagtttcaacatttgtggattttaaattatcttggttttaggtgagagtttggagagttccctgtacccttcaacatttatgcttcaggttgttgaagagatttatggagttcattttagttgttgacatttttgtttttctttctaatacttacaaagtaggggatttataattactatataatttaaagtattttagaatgtgttttttggaagtgggtatgctgagaaatgcctgtcaaaataaacattttcaataatgcaagcagtatgaaaccagtgttccctgcagcaagttcgagcaagccagacacttctttgaaagcaggctgctgttcagttagccatttaacaaagcaggaaatgtagaccatgttagcaatgcatttaatttaaactgatgtatttttcttctaccgtggaaagtctaaacaacctcattttgctatataccagttaaaagttagctaatcgacactggtcatttagaatagtaattagggtactatacgtgtgaagtttcaggaccagtaaaaggtgttgcttgtagtcttaatttatgcctggaacttaaaatgaaactccatgaatatatttattataggtaatatatgcagattaccatatttatctctgtatgagcaggcatggggactcagtttcatcttcatgcaatggagagttaagttgtgctttttcttaattgggtattgcacagccaggcttggttacttgcatctggatggggcagcctaagagaggccagggcctagactcaaaacccacctgcagcaggtaggatagaggatagggtaggtaaacactgaagatgcgggtattgggaaaggtttatgtggacaggcccaaaatgtaccaaaggtgagagagaggtatccggtatagtagataaggcaagcatgggatgttccaaatcacagcaagcagaatgttttaacaggggtgcccagaattctaggtaaactacgtcaaagaagactgtcaacaggtagggactaggacttcagtccaggggttggccaaaaggcttcatctcgtgtgagtacacaggtcactgtgaatggatttgggagctctgtgctggtgttcagaggctgcctttggacttagtggaaaagaattggggtaggggtgtggcacatggcacttaagttgaggtttatgttagagactaggtagagctggaccctgctctcagtgaagggctagtgggtagtcctgatcttttcagtggccactcctctagagagaggagacacatggaagccaaagccagacagggtttgacagatacccacaaatgaatttatcacatggaattttggagaatttctactacacaaggtatagcagaatcagtggtagagtttgattagcctgactggtgtaaactagttaaacgcctttgttagtttcatcctaattccaccaaagtaaaaacgggtatctgcactattttcataatgccacccggaaagctgtttgatatgtcaaaggaccctacatttctctgctgagcaattggtgcgcctgtttcaaaggaggattagttccatcagctctgctaaaggatgacaaagccttgaacatttgctagatcatcccagtatttatgtggcctcttaaaaaaaattaaatccaagtcggttttaaactctagtttgagccgttttcccaggaagtttgtgtgatttgtataggacctttggaattaaatggctgttttagtgtctctcatgtgtgcatacattgtactgcccactccaggaacaaaacgtccccatccagaacatcttcgtattcaggaatggctccagtgcaaatgactgctatggcagcctgggttgaagaaatgattcttaggcctggtttaaaaaatgcaataatttcttagagtccttcagcattgccacagcatgtgctagtaccagacagaactttgaaagcacagcaccttacatctccagcgaatggccatttacagtaacattgttgtgaacacaaatgagtacctgaatgatgtttaagggagacaaaagcaagactctgttatagggcagatagacagcatttctaattattaccagatagaacttgaaatgacaaagcttatgatgtttgaggcaaagtatcagttcaaataagagccattagcacatagtatctaattaaatgctaggtgggagtacacatactctaagtacaaaaagaactttagaaatgcagctggtgactttctagggtaatggagtagacagaaaaggctcatagaagaaatagggcttgaaatgtgccttgaagaataggtacaatttgaataggcaaaggagaaatagcattttgatgcatggagtttaaagacttattcaaaataaattacacagtacaaaataatggcttggtattttacaaaagcagtacatattttaagtgatagtatcacaaaaaacatcattttagagttgaaagcattgtccagctttaccaatttggacatgaggaaaccgaggcccacagatagaggttcgctctgtgctacccggccagtatgggcccaaaccgggtctgcccaggagccgcctcctacactccagcccattctatctgccatgccctgctgcctggatttttggaaacttcgtgagcaatgaggctgcttttagtgtccaatcaaaaactcctctgaagtttccagcatgtaataaactaaaaatatgtgaaattagcccccatgggtcacatatagtaaacaaagtcagggcaatgtttatacttttcaggataaggctccaaatcactccatgagctgtgcagtggaaaaaaaagtgggcttctgactcaaatagatctggattggaatctcaactctctcgagtaactcagcttttccaaattgttttccagactgtggaattgggttaatgcctctctcctggggttggtatgagatttaatgaactgataatttctctgctatctatcgcatcaactctagcttttgaggccttatgggagctgtcctcattcagcaggtctgattccttcagtccacccattcctcattagttgtgtgaatcctgtcaggcctttttccttactgacgccatgttcccagccagcagagctacggcctctaggagcctgtaggggctaaaagggacacttgggaagttgccaccctgatgtgggtacattgcttggagggagaaaggtgcctttgtatgaatatgtggcttggtgaatggagcagcctagatttcatcaccactcctccatcttgcctaggtgcctttgcacagtgcacaaaatatgcaaccatacgtcgctgccccaagcagtgccatccactttatctgcactcaagtaggtccttcccgttttatatgcaagttaagtcgacccattcagtatgtttatgcctttaagcttcctgtcaccttatgtttaactgtctatagtttttcctattcatctgcttaattacatttctaaagggtaggggtaaaggctttttctccttttgagctcttcctagcagagaactaggtacagcataataattatctaaatttttctttgataaacttccaactttcaaagaatagtaatacatcaacacatctaatacatccagcaatcctgggaaataaggattctcctcatttacagagggaagctaagatttggaaaaggtagggcacagagtaagctctctagactttgttgatagtttgctgttctattttgttactaaaaagtcttaacttgtcgtttggctttcaatatttttttcttgaatcattgtgttatctttacccaattaatgcttaggcaggtaaagtagatttctgtaggcaaaccaaggtaaaaataagtctatttaacacagggtgcctttgaatgaaacccattataagtgtatttacatatttcagatttcatggatatattcagaaatattaatgtaatataattgaagtctaatattgcaccctcaagcccagagtggaaaataaatgactctttctaccccttgcccttctacacctgtcaaagttaatttttaaccactggcacattgcaaaacattcatcctgaagagcctgattcataaatcttgttttaaatgctctgggcttggttctcaacccagactaaaggcaagcactaaggtagagggaaatgacattcaaagagttttacttgtctctgatttaatttttattggtttaaaatgtggtctgacattagagggttgcttcaaaggtgaaaaatgaaactttgaaaaattacatgtttgtagatgcgtagaactaaacgggcaagccacactaggttttgtcaaacaatagttttatttgtgtcctgagagacacaggtattttggtatgtatgtgtttaggaggggtatatagtcagttttacttttgttttcacagtgcagatgtctctttgtctcaagggacaaagatctgagggagaattgcaggggggactactttattctgctaagcagtggggatgcctttatcagaaacctggtagaatgtgtcagagtttatacatacgtaaacctgggcttatttatatacttaaatggatgttttccttagcataatgtcagttaagaccagtggatatggagcaaataatttgaattaccctaaaaggccctctgttctaagttgtcttaagttaaaattatgaagagaggtattcattttacccttagatgaagattttggttaatttttgttgtctattctttttttcatggtctttgttcataaatgatgtccagaaaaagaagaagttttctaggttgaaagctgcttgtgcaacatttgccacttgatggtgacttgtacatatgaaatatagtattcagtttgtaacttttgaacagtttaaggatcaagagacattttcctaactatatctgctgagaagtgaaacaatgggctgtatttgcctctgaaatgagttttacgaaactttgaggaaagggagaatgatacatattgttttaaagaatccagaaggtaaagttagttttccagtgtgtctaggcctttgaggtcccagagaaatgctgacattaaaataaaagttttcctacaacactagcagcttcgtgaaaactgtacttttgatttactaattagtgagtcatatagatcaagtgacagtaatacaattatgtacattagttggtgtcaaatttggacatacgaaatatacagaaagttgatggttttctcccaaagcaggaattactgattcagttctaccagcagagggctcccttttttaagctaataaagaacatgtgtcttgcagatcactttttaaacactaaaattcaacgggaaaaagattcagctcacactttcctaatataataggacctctttggtagatgattgtacatattgtgagaaatttgtttaaggcaaagtttttccaatctatttcaagactttctatacgttgagagagtactgctttccagtggcttattttcttctgaaacagaaaatatactggtggacttaacagagcattttaatcttagaaggttttgacatgaaacatcatgtgaatccagacaggtatgcttaggagactgatgtttccaatgtttctagctttagaaaggctatttttaaaagtagggcaagattatgcagctcaggatgcaagggtattctctgaactaaccatatgtccctatgatcagatggcagattcacttatagactgttatttccattgggaaagtttttcaatattatatcagttgcactaaaggaaagtttgtaaaatcactttcattgtgggtttaacagcactttccagatatttcaagtaaccctgaagctagttgctgctgttggcctgtgtggactttatgtgaccactggatcactttcccatgcagagtatgagggtattattgaaagaacctatgtcttcaaagggaatgaaatgttttgttttaatttaagcaagctaaaaatagaaaacagaaaaaaccagagttttgttaggggtgtgaaattttttgcatgtggcttaaaagattaacttcagttttgtccatttttttttacgttctctagcaaagggaagtgaggagcagggacaatgggtagagaagggcatttgaaaccatcagaagattgggttctagtcttagggctataatcttctgtaaaccacttcacctccctgggtcagatttcgttttcccctctatggcatgcaggaattgattgaagtgaactctaaattactttctggtgtaaagtttggtgatttccctggataaccttaaagctatctatgctcatgcaactgaaaattttcttagatcaaattttaattaaatagtagtcagtaatcccaagtctggtccattgccactttctcaaataaagggcaaacatccgcttagaaaggtatgcccttctctgcccttctatcctttaccccattagctggcacataaacctaatgcagagacaccttttaattagcaggtcatatggccatttaaatgcgagttgcaatcgacctcataaaaatagccgcagtgttgttttattctgaatcgtcacatgatcatggagtatagtatgcatatggtgtggggtttaatattcgtccgaggatgccctcctactacttactattgaacatttttgtaatctcctccctgcccgagttgctcacaagggctttcctgttacacctgcagggctgtctgtgctggtgtgtgggaggaggtgcaagaggtggacacgagcgaggcgctgtgttctgggttgttccaagaggttcaggcctttacaagtgaggctttgattctattttttgctgaactagctcagccacttcctgtgtttggctgtgcatagtgcctcgcttcactgtcggctacttgagccccgcgagccagccagcgcgctcagcagccagtgagactattttaggtcccctcacaatggccttctcatttcccaggcgaaaatgagcaagttggtcttgcattggccacttgtcagccgatgacaactttgacttgggctcccctccccctcccgaaatccctagctcagcaaatatttgaacctgcccaagttaatcatgaagctgcgatctttatctaagggagacgtgcgagcgcctgggctcctttcctccccgatacagtagcgaaatccagttggcttctcaatgaggagccggcagtgagcggcggtggcccggacgcactgccgggcggggcgtggggcggagggacgagccgagccgagccaagcggagctgggccactgtgcacgcccggagggtcctggcggcgcccccgctcctgcgcgcactctcggcgccggacacgagcactgcctgccgggaacaggctggggggaggtgcgggggcttggcccacttggtggaagaacagctttggggattttttttttttcattgtcggatacaggcatttcaaagggaaaccgttgaaatgcataacctgcaaagtaagttgccttgaatttgtgcacttctctgttccttatctgagcggtgcctttctgtagtttgtcttggagtacgtgtgtgtgcgtgcgcccctgtaagcgctgcctggggaggacagatgggagattaggggagacactccccctgtcctcgagggggacagtggctgggaaagatagggtttaggttggaatttcagtaagaaggtactaattacaacgtgcttggttggaagttggtgccaggccagggcttggagagaccatgggaaaatcacctgtctccctgccttctccctgagttagtttgccacagaagatccaacagccagactggtttgcaccgacggttcccaaatgcatggactggcactctgggctgttacacccgccacagctgctcggagaacttgtctccttgcttcgggggagggtcgacattttaattaaactaaaaaagaatgtttttctgaatcttagggcatacagccacttttaccatttttatttgaatttgagttcaggtaaacttaggcaaatagaaaagtgggagagggtgggaagagacaaggtgagcctgcttttcccaatactgggaaaatgaattaaactagacgggggacgtcagagaacagaatgccttgcctttggtctgctttttaatatattttatgatcccaaattttacagaaagtctcaagggtttctgtgttttttaaatggtcaaatatgtgacatacatgtgtacatagatcacagagccccactgtagttttttaaatgagccacatttaccttggggaagagcccctccccccccgccatcataatattgtgaatgtaaagagagattggttcacaatgagaatgtacagtaggctcctataagggtgacaggattatatgcagaatgactttgaagagccaaaattgatttatttatgttaagtagtgctaagaaggaatatttgtcccggagtgaggcatttgagatagagggggaaaagcaaaaaaaaaaaaaaaaaaaaaaaaaaagtgattacatcatcttcccgttcaagcagtattagtagcgaagatgggttcatcagtgaaatattttgcaaagataaatatacctccactctgcattctgatctatagcctctttctttttggaagaagcattttctttgcccagtttttttaggcagtcacattaaaattctcattaataatgttgacagacaattacgtttattatttctgctaataggcatctgcattcctattcagaattttcattgttagtctataaagtctagttttaactttggaatgtttggtagaggaggacatctatacattttcttttaactgtcctttctaatgtggtacatttgtgacagtgtttgaattctgggttttcagtgaattatggaggactaaaataccaggagtagtccgtactgcttctcttatacatgagagatatctaaggactataaaacataacttaagtatacccttttaatgcctttgtaagatttttaaaccaaggaatgactgggctatctataaacccagatgcactaagtggggagaaaagctcggagctgcagcatatcagcttttgtcaacctgccaacagcagagcgtaccatgctgcaaggagtaataaacaaggaattagaaaactcgctgctggagaacagtcaaattaaacacctttttgaaaggatgagcatgtatatattgcagttctattaaatgtagcttcttagtgaggttggcattatgttaaggctggtatggaagagaactgatgaagcaggagtggtctggtgacatttttctgacttgattggctggggcgtgtgatgtaataggtttcagtgcagccccttataggttttaaaatgaattccaagacaccattacaaagaaagccggactcttttcttataactgagctcagccaaggaaactcttgcacaaatgtacaatactgtttggaatatggaagacctggatttagaatatgccaagacagatataaattgtggcacagacttgatgttttatatagaaatggacccaccaggtaatactgcagtattattgtagagagttagttaatttcgtggctttttaatttttcgaaagctactgtaaaagatcctttttggatttctgtttttattaatttgtttcattgataaaaattagtttgctcatggcttaaaaattaaacagattgtttgactgtctgtggaagcaagcagctcaggctgtgtgtggtaaatgcttattcttacttgaatggatatgaattgaactccagtttttcactggtgtcttttgttaatcgagatccttccctgggtgagttatgttgtgggatattgtccctgtaattaaaatgatgcatcttttgtgctgcttttctctgttgccagtggatgagaacagtgtagcactttgcagtgataacacttggtactttagaaagcatgtaaaatgtagcagtgattacaactcagttctctaaatgttgagactttgcttgctctctcatattaagatattataatgaaaaaagaagttgactttccattattgttagtctttgtaaaatattcttggtagatacctgaaatcattttttgtataagttaaaatagtaacagtgctttaaaacttatgacagaatttacctaaaaatcctagatttattttgtttcctaagtaagttgttttattccaatgttagctctccccctgcccccatttaaggtattcaggaatactgcagtcttttatttgtcaccaattggtatatatgaatactgatttgacattgaggaagggggatatcatttttaatcagacctagtatatagagcacaatttatccaacagaatattaacatattaaagagatttagggcacagatgagagtttcttaaagtggcttttggcagaacagtgcctgaaatactaagattagagaaacccaattgctcctcttaaaacatactgctgtagatgagcctttttattactgcaacagagtttgtggaggacagagaccaaatttgtctttcgtaattaaataagaggaaattaaagccaactcatgttattcctgctactcatatgttcatagtttcttactttagatggatttgaccaggcatgaaactttaatataactagaatctagaagtacagaatgtcatgactctggatttactttgaaatttattcacatggccagcccaatttatttgttagtttctaaggctctctctcttttctccttttcagtttcatttctttttgagccatgctctgaaagattttttttaagaaaattatcttccatattgcatggaattgtgaactaatgctatatatttcagttactctaactttttatttttttaaagtaaaagtattcatctaaagaaatttagttctaatgtagttgggattgcgaacaactttttctttttcatctgcagcactgcctcctaaaccaccaaaacctactactgtagccaacaacggtatgaataacaatatgtccttacaagatgctgaatggtactggggagatatctcgaggtaaggctacagaaacttcattttcagagagttttagattaaaagaaagaaaagcaccagcttgctaagttccatttttaggatatcatccaacataagcatgaagcatagttggttctcttccaaagacgaccagaaaaagtcactgagcactggagaactgtgggtgctggatgccacaggaaattaaatacccgggaagtttcattattgacagagatgtcagtgaagtgccagagtgaagtggcactgcctaagaacagagtgtgaaggcactctatctattaagcacaactctaagaattcttgccttaaacacaataagaaaacaatgccattttatgttagctttgggaagggggagtaaggttggagaaactcttttgagatcatgagtttctgtgctcatttgtcagagagattgtaatgtttggttgaaaaaataaaaacttagtaccacagatacaccaatagtgaaagtgatatgcacctgtttgtgatgagactgcaattgctaacatttctatttaaacaaattattagctcttattagtgagctctgaaaatgcaattcattaatttaaatctatgtgggcaggaggaatatgggcactcactgtactttccacttgattttgctgtgaacctaaaactgctctaaaaaatagcctattttaaaaaatataaatctgtggtcactaaaccttaagatgagcattgttttgtgttttcatttcagggaagaagtgaatgaaaaacttcgagatacagcagacgggacctttttggtacgagatgcgtctactaaaatgcatggtgattatactcttacactaaggtaagccagggaatatagctgaaattagggttttgggctgatattaaaacatatttccttattccaaaatgttaatacctttatttttatattgtttttacaggaaagggggaaataacaaattaatcaaaatatttcatcgagatgggaaatatggcttctctgacccattaaccttcagttctgtggttgaattaataaaccactaccggaatgaatctctagctcagtataatcccaaattggatgtgaaattactttatccagtatccaaataccaacaggtaataaaaactgaatgaattatccagttacgatgtttagacaagatccttttaatacttagaaaacatttgaagcagatgaattacatgtaatcaagtctaaaaaacttgacactcgtaattacataattgcaattttaaagatgtttccatgtcagctattttgttaaacaattgttatttgattaaataccttatccattgaatttattttaatctttctaggatcaagttgtcaaagaagataatattgaagctgtagggaaaaaattacatgaatataacactcagtttcaagaaaaaagtcgagaatatgatagattatatgaagaatatacccgcacatcccaggtgagttttctatgaaaatcagattaaaaaataagagttctaaacttttaaagactaacatggaaaaaagaatttaaaaggttgagtttttacgaatgaggtgggggtgagagcatttatttgtgaatcattgttgattattctagtgtaatatctctaaagctttaaaccaaaaattttaagtatcagaataataaattaagttcacgtgataactgaagcagtcactgagtttcaagttgatttaattcgtgatagaaggatcctgtttagattggaagttagtaataactggaagtttcacagacttgtctaatccctgaaatggagatttaggcattaatatatatcctaccatgaaaaggaagggctatatactgctgtgcttttctagacccttattcttcactggtcactcatgtatctgggaatgccagagggaacagaaaacaacagggatgctataaactacaatagcttttaagaagataaaaactataggaaattgctacgcaatcatttttcatagattgagaaaattctccagaggaaatacttgtttctgggatactgttttaatggattttatgaatttgagtcccactctgctaataatacagatcaaatgtcctggtagtgtcttgcagtaagagattgttctatgaaaggtatgacattatctttttaaaattatgttgcaggaaatccaaatgaaaaggacagctattgaagcatttaatgaaaccataaaaatatttgaagaacagtgccagacccaagagcggtacagcaaagaatacatagaaaagtttaaacgtgaaggcaatgagaaagaaatacaaaggttggtgtttcccttgttcttgtgctagagataaccaaaatcctctaaaaccatttaaagatgatctcgctttctgtgctttgaatgatcacgtggacacaggaaggggaatatcactctggggactgtggtggggtggggggaggagggagggatagcattgggagatatacctaatgctagatgacgagttagtgggtgcggcgcaccagcatggcacatgtatacatatgtaactaacctgcacaatgtgcacatgtaccctaaaacttaaagtataataaaaataaaaaaataaaataaaataaaatatgttgagccactccaaaaaaaaaaaaaaatgacaggaagagaagccacgctttacctaaggaaaactgctgggaaaccatagtgaaacttttcataaactttggggaccgttcctgatgtacccagataataacaaatacgtttcttttgcctgcaggattatgcataattatgataagttgaagtctcgaatcagtgaaattattgacagtagaagaagattggaagaagacttgaagaagcaggcagctgagtatcgagaaattgacaaacgtatgaacagcattaaaccagaccttatccagctgagaaagacgagagaccaatacttgatgtaagtatttgaaatggaatcctatacatgaataattggtgattgctacaattcaggatgagttaatgcgttctcttttcaaaactgtttttcaggtggttgactcaaaaaggtgttcggcaaaagaagttgaacgagtggttgggcaatgaaaacactgaagagtaagtagttactaaagatggtgatagcagaagatttttctcattttaggaaaatgcatgacttgctttgtttttagaacaagtgaggaattttactgagtttggaacatcttgtaggagaaaatgtataaactcagtgccattatccagaattttaaaaaaagaaagcttagctaaggaggactaggatttatttttactcataatgctgtgaaacaactctctgtgtccataatgatgtccctgaacatctgaaaaatcccaaaatatttttggaacagtcagagaaaaaataattatgcttaatatattttaaagcttaagtatatactttgtttgaattagtcaaaaactggcaatctgcctagtcaatttcctgatctaaactggataaacgagattgttttaataccttccactctgcccaggtacctgagtgtggttgcttgaaaacagaaatagtacagttgattggtaactctttgtcctgggaggttgcactggaggctgaataccaggagaggaaaactcaggtcgggcagaggcaggcatgtgatggccagtctgactggcttggtaggggccaggagggaagtgacgggggtatgcctagggaagacagcaaggcaggctgatggctcctgcactcttcatttagaaactttctgtcctgcctgcctagccaatattcactggtggaagatgatgaagatttgccccatcatgatgagaagacatggaatgttggaagcagcaaccgaaacaaagctgaaaacctgttgcgagggaagcgagatggcacttttcttgtccgggagagcagtaaacagggctgctatgcctgctctgtagtgtatgtatctccagcaaacttttctttacaacatctcatgaagagatgtttcatttattcattcattgagttttgggggcaaagatttgacatagttttagtcttgaataagcttacagtacaataatgtagaagagaaaccaaagcagctgtaataccattttaaagtctagccagaagtgtatgttaatacagtctaatagatacctactgtttagttggaagactaggtttggattcccattcagtgctaattaatcatgagaaatcgccaagtctttttttctcatctttaaaatggaagtggcagtgcctgccttttttgcctctcaaggctactatagttagaatctgaggtaatttatgtgagaacatcacccataggaaaaatactcatcaggaacaggtgaaaaaaaaaaggattctgatcattatccttgagataggtacacccacattggatcactgacatcaccatttccaagaaattaatgtcctctagtagggaatggttctaaaagtatgttacactccatgatcacctttcatttaatgagagaaatagtcctacagcaaagaagggtacttttgtccttactgtgcataagggcacatgcagagatggagagttgtgcagacacctcaaggacagccagaaagaaggaatcctatgaatagtcataatgggagtaatagtaacactgctagtcatggagcactgcagatagttgtcctcatcatgattggaagctaccacttgttgcatgcttactgcatgtcaggcattctatctagcattttgcatgcatgatctcatttcatttctcaaagtaactgtattacatgtattttactattgtcttccctttaaaccattttaaagatgaaaatacagtcagtcagtgaagctgggttacctacccaaggcactcggccaggtgtcagttgtaacctaggaccctttccccaagttgagactgcacaataatgctttttattaaagatgccctgaagagttgtgaattgtcttggacaagctcaaaagacagtttttcttctctcctctctagggtggacggcgaagtaaagcattgtgtcataaacaaaacagcaactggctatggctttgccgagccctataacttgtacagctctctgaaagaactggtgctacattaccaacacacctcccttgtgcagcacaacgactccctcaatgtcacactagcctacccagtatatgcacagcagaggcgatgaagcgcttactctttgatccttctcctgaagttcagccaccctgaggcctctggaaagcaaagggctcctctccagtctgatctgtgaattgagctgcagaaacgaagccatctttctttggatgggactagagctttctttcacaaaaaagaagtaggggaagacatgcagcctaaggctgtatgatgaccacacgttcctaagctggagtgcttatcccttctttttctttttttctttggtttaatttaaagccacaaccacatacaacacaaagagaaaaagaaatgcaaaaatctctgcgtgcagggacaaagaggcctttaaccatggtgcttgttaatgctttctgaagctttaccagctgaaagttgggactctggagagcggaggagagagaggcagaagaaccctggcctgagaaggtttggtccagcctggtttagcctggatgttgctgtgcacggtggacccagacacatcgcactgtggattatttcattttgtaacaaatgaacgatatgtagcagaaaggcacgtccactcacaagggacgctttgggagaatgtcagttcatgtatgttcagaagaaattctgtcatagaaagtgccagaaagtgtttaacttgtcaaaaaacaaaaacccagcaacagaaaaatggagtttggaaaacaggacttaaaatgacattcagtatataaaatatgtacataatattggatgactaactatcaaatagatggatttgtatcaataccaaatagcttctgttttgttttgctgaaggctaaattcacagcgctatgcaattcttaattttcattaagttgttatttcagttttaaatgtaccttcagaataagcttccccaccccagtttttgttgcttgaaaatattgttgtcccggatttttgttaatattcatttttgttatccttttttaaaagtaaatgtacaggatgccagtaaaaaaaaaaaatggcttcagaattaaaactatgaaatattttacagtttttcttgtacagagtacttggctgttagcccaaggttaaaaagttcataacagattttttttggactgttttgttgggcagtgcctgataagcttcaaagctgctttattcaataaaaaaaagaaatgaaaaagatatatgaatatgacaaagtattgctgagtccaacaatgttgttttaagactcttaaaatacggtacctggcaatgtttatttcataaagaattgtgaacttcttgaatctagggagggggaatgtagtgaagggatgtatcaagtggggtggtgggagggggaggcaaggttatatgcactttctcatgatttacagagaagtgaataactgcaaagtgaagttgcttcttctacttcagtcttctctcactttgatttgctagttgttatcaattaatgacaattacaaacctactgtatctctaatacagtgtgactggtcaggtatttcagttcttaggaaggaagtgccaagtttgtttttgggttcctggaacagcgctcacctttgtttagaacactggtttaaagggataatcatctctgtcacattagactatccatcatgaccagcaaatactcattttaggaaaaaaaaaagcatgatctgaaaaatacttttggtggtatgttggttaccctcctagctttccatttggtttagaacataaagcaaatagacacagtcatactgtcactgctctggactgtgtggagctcgctaaagtcatggtcattgcaggaatccaagtggcagtccttctcattcattctaatcattgtatgtgcttcactacgggggggagaaggaaacgttagcatcatgtttcccatttagggcaggagtgagaggtctctcttcctgatttagatatgcaaaagctggtatgttcagtaggaactgtacatgtgttgggaggcataaagactaattagcaaccataatatggtcactaccctaatagactaaatgaaatcttgcaatttcaaattactctttctccatattagatttacccacagctatatttctgtttaagtactagggtgagggttttctgttactttgttttttaatgttgttccttttgaaagaatcagtcttgcagctgagtgaaaaatctgtggaatgtattatttgtcctctttacatgaaactactcatacttaagcaaaagtcagtcttatagcaagactgttagccctcaaacttgactctactgatctgaccatttccctctcatcgccagacaactgacgatttccctggttttagtctgcgtctctgctttaaagttattgtgatatccttctagatcatacacaagtctaacagttaattagttaacagtttttaaactaggtttgtgggtatttttttggtagcacatgtatgctattacatacaaatttttatttctaaaatataagatctgagattgaatattttcattaaaagctacagttttgtgaatctttgtgcttcaacattctttgcaagatgatacggtatttaggcatttgccttatttttgcatctcacaaacataagtgcaatagatcttttcattgaacagcaaagtaggattcatcattccatatgacttgagttacaccagacctgttctgcccaatgcctttttgattacagtgtagcttgcccaccgcatttgtcgttttagatactttgctagccggccactttggatttcatcagacagtcctaacaatattgtctgaacggctgaatatgaatagatacagcagaggcactcctgatatatgatttttatccatgcgtcagtttttcccacccagtgtagcatcctaaagataaagccagaagctaagctgcagtgaggctgtgattgggcgtagaagtgggagcattgggacctcacattacacacacgagagatcataaccatgtgaaaaggcaaaaagcatgtgtttgcaacatctgataacttcatggcctttgataaatgtatatatgtatatgtgcatggactgtgtttccagtacacctttcagccaaaacagatccacagtagttgttgagttcaagtacataaagtacataacaagcgaacgtctagtacaattcttacttatgtgtatgggatttttccctttgaggttgctttgttttgtcttacaaaggtgaaaattgtttgtaagtgaagtgagaagttcatatttctttggcttttttgtgtttttaaaagttactccttttagggagctggtctgatgacttgcttagcttggaaatccttgttttcagtgtgtcgagtcaaaatgtgtttatgtgagctgtcactgtggggaaccaattgctttgtcatatagctggttatgaactagtaacatgtttgggaagtcctactgatgttcctttggaagaaaaaatctgctggttttaacaactgtgcttttgctatgtatggtatccaagttagttgaaacgcagacactgagatctgtttgagtttagggtcatttttagaaaggggcagtttaaagcacaatgtctcacatgggacaaagttccaaaatgccaaattcttattttttaaaaagctagttctataaaatactggtattatgggtggggaggaaatagaattgagtcaattggaaagactatccaacttaacatgaaacttgtcaccatgagatagcattagctgcccaggatgctgctatatatatatatatatatatatatgtgtgtgtgtgtgtgtgtgtgtgtgtatatatatatatatatatatatatatatatatatatatatgtgtgtgtatatatatatatatgtgtatatatatatgtatatacatatatgtatatatatgcacatatatatatgtatttaaaaaaatcaaaacaaaaaaaaactcatttatacctgtgtattttttaaagctacaatctgttcaatgtttttaaaaatctgtttatatgacattgttaaaataaagttggtcttttgacgagagggaggatgtcacggtcagttgtaactttgccttcacaaggcaactggggtggggggtgggggtagtgtgcctccttgacatttcgttcaagttatagattcaatggagctatgtcttgttttaagttgctttaatgcattgtattagatcttcaaacagaataaaggttgttttgaaactgaagttttgggttgaaatttcacttatcacctaagaaatctttctaaaacagctaccttttggcttataaatgttgctgctatttctgttgtctcccacccactcccttttgattgttatcacagtatctcatttttgtaaagttgagaaggacattgagtggtcacatgtaagtaatacatatgagctgtctttcataatttcactgttttttgagacggagtcggagtctcactctgttgcccaggctggagtgcagtggcgctatctcggctcactgcaagctccacctcctgggtttacgccattctcctgcctcagcctcccgagcagctgggtctacaggcgcccgccaccatgtccggctaattttttgtatttttagtagagacggggtttcaccgtgttagccaggatggtctcgatctcctgacctcgtgatccactcgcctcggcctctcaaagtgctgggattacaggcgtgagccaccgcgcccggccaatttcaccatcttaaatgaggaaatacacctaggtaatgtcccttcaaggcacgttctcgctataggaaaactagaatgcccatcatccttcaattctcgcctcctccgcattcatacccaaaccttgagaatcatcctctaagaacgaagtgtccagttttgtctctgttgtgcagtctgcatattttgaacactcacagtgcagggatgacatgggactgtagacagggagctaagttacacctcaaatgcagattttacattgtatcacctagtcaagatacacaagtcttactgtaggataactttcccatttgttttgattgctaagtggacttaaggcaataccactttgcatgtatatggtgtttacatgtagacacagtgagggtctagacctgaaagacatagtctagtagtagaggggagagggacgtacaaataattactctcagggcaacaatgactaatattttttgagtatggcagtagctcccagactgatgttctgctttccccctgctctgtttggtatcacagagaactatattcgctggagcgcttgtcctggggcttctaggtgtctcttccctggctctagctcctgccagatagaccctcattttcaggtctgagcaaaccccctctgctctagctctcaggagaaggctctggaaacattacctactcccattttttactccagcccaagaagtggttgcagctttatgctgttgctaaacgtctggtttccctcaccacccccatttggtttctgaacccttccctcactcaagtaattatcattcaattattccagtaagagctagggtaattccccccccacatacacacactggtctctgacatatcaagtgattattatctgttaaactctttgttttactctttccacaattacctgggtaagatgattatattcccattctttagatgagaaaacaagcatagatgtgagatgacttgctcaagatcatgcagcatctgagaacagagttgaacgcataggcttctcaagccagagctctttgcccctatgctgtaatgtaatagactttcaatggaaaatgcacaagagaatgcaaaaaaaaaaaaaaaaaaaggctcactggtaactttttgctggggaggtaaccatgtggctttcaattagtagacagtgcacaggtggtcaatgatgaatcacaggaaatagcctgggcttgctttaaaccagtggttcccaaagtgtggttcccagactaacagcattcacatcagcatcacttggaaacctgttagaagtacaaattcacaggccctacccctgacctactaactctgacactggagcccagcaatctgtttcaacaagctgagtgattttaatgtatactaaagtttgaagatcacgactttagatcacctgcttactgaaatagtacttctagcattttaactaaaaaccattaccattaatgagtgatatgttactttctaatttattttcataatgtaggccataggaaaaagaaaacagattgatttgcagtttaggaggcccagtctgctctttttatctgtctttaaccagctgtgggaagtgggccaattcaaggcaccttccaggcctccaactccttatctgtgagataaaggtatgggcctctgggactccttctagagcatatgctgtgattaagtgagctgaatgaagattcccagtcccccaattctccatttacaacttgaccaccaattttaacccacaactaatggtcctttatgttgccagtgactatggccaagtgaaagcatgcctcgaattggggtatacttttcttgctgacatcttaaaagtgacacttgaggcgaatctaaactggcagccaagttcttgacagtgtggagagagtgtatttggaaatgacactctgcccatctacctaaagcgtgaagtgctaagagaatttggcctaccaaaccctctggggcatggtgggaggcaggaaagtagagtctgttaagacctgatacaatgtcagtcaatttcaaaaacccttttttttcccccgaacttgtcccttaaaaggtctatttaaaaataaaaatcagttgcaatatcttaaagagacagaattgattattcactctccaaacttcagattatcttctcaaaagatagcactttgtaacctccagtttggtattgctgtcataaatcaactcaacagaaaaccgctgagatgctttgggggagggagggtgtggaggataaatgagtaatcaccaacatgctaatctgcattttgctttccagaaggaaaagagaaattcccttctctctgtagcactcaatcataagagtctgaagcatcacctcaggcttaacttgttaaataaaatattctaaatctatacctgtcttgacaggtgtaaaggtttggcctataatatgagaacaggacagtcaacctctaactaccaccactaatcacattaggaagaaagttacaagggaggtctattcatcaccaagactgctcattagaattatagttttgactgtgaaatataccatacgttgtaagactaactcgctggaaccaatttatttatggagctctcatttcagaactcagtgatttatagtccaaaccctcacaaatcaaaaaatatagataacttcatcacaatggagatgatgtgctagtcactttatgtcatatttactgtcctctaacagaggcccagtgccatgtttaaaactatttaaaatagttttgttgacagtggtgatgatctgtttctttggacctgcgaggataagacatccaacgagatgtctaacgtactgattcattcaaagctttattgagcacctactatttgctggacactatttccctctgaaggtccagtgataagacaggtgaaatcaaagattacagtctgctggtgaaagcaaactcaaacaactgccctctatcatgagatacagagaggaatgaacactaagtctcaagcaggcctgcatgagcagctaggccaagcttcagagaagagttgacatttcaaatgtttcctactctagtaaaacaggcccatgtactcctggtggttgctcctcccaccagccttcatggaagctggttctattgaggctagaccattgtacttctttaatataatcacttttcaggtgacatgtttggtttttcaatactgtcaaaggcattatctccattataagttctctagagttcaatgttcccatctgcagttcccatgctgcaggtggttcagacagctgacatcacacacctcagcttcaggcaagccacttttctccctgtccagggacagatgccagggcctcacttggctctttgccttggcacattagacgtgatctgcatgcaactgtaccttttccttttattttagatgagaaattctcaaccctagctgaacattaggatcacctgggtatccatttaatagaaaacctgacttattggagtctctaggggtgagcattaaataagatgtacagaatgcacctgcaacatggctggcacttaataaatggaaggcaataaatatagttgttagtcagtcttgcctatcaagattagattccccaaaactatcgctttcgatttcctgtcgtttttaggatagggctggctggacacatggtaaatcacccaaaatctgtaacttttaagatattttatataagatatttatatttattcatatctgtacctactttcaggaagtatttaccttttattggctcttaggcacacagcattgatttactcatccaatggactaaaaatcaccaatttatgtgtggctggctcttctattattctgaaatattgtataacattaaatacattgaatgtatttataacattaaatacattcaatgtatttataacattaaatacattgtatacattaatatacactgtataacattaaatataagtatgacaaaaaagccatgaaatagacacaaaacaagtagtgaaggaagaaaggaagggagatgttattgaaaataaaaaccaattgtctctaagtttcaataattgaaagaaaacaaagcttcctattagccaggcaaaaaaaaaaaaggggtgcacaatgctttcatagttccagtgctctgggagaaggaacttgtcagttcagtgtgaactaaacgatcctctggccctgacacttgagaggaatctgtcaaagggatctctgtaagtggtagtgcctcttacacaatgttcgattagaaatggttcttcagatatattctccatatggtgctttcttatttagtctgtggcagaagcagaatattgttctagaaaggaggttctgtgatgttggctccagaactctgctcgaggtgcatcttgcctgtttcctagcactgtttgggctgcacccacttcagcatgccggagaaagctgccctgcaagttctacagaaggaaaggccaacaaaatcagggccgctgcttatttgctagactgttccaggccagcagttcggtggtgaatcttcgggaagtctttgtgacatctcaggcagtgccaagtctcaaagctgtgggggactagacactccactcttttatccagacatcagctttgtctggtctagagcccaacttcatgcagcactgtgtttcattcatcattttccccatagaagatcctagttctagttcattttactacctttaaaattttatctctcaaagatacattccaatgatacattttaataacaccccgtaaaactggaagttcaagttttctggctttttccccaaggagaagggttgtcatcaatatatggaacttttgaggaatttctgcaaaagtctgtaatcacagtagaatgaaggaaattttaaccagcctacaatacataagggaaattgtctctggcgagtggctgtaaatccttagcagaactgcacagtgtattctcccacatctccctagtttagagaaattgaggctagaactaagggtgaggcagtaagggtgcatcggaaaaccttcaatcattagctcttccgcatgtcactgaacacagagttgggaggaggtgcacagtagcacaccagtatatagtattgccatcatccagatgcaatcaatgaaaagtaatctcaagagtattgataataaagtaaaacaattaggaagtgatgagtttttagtatttgattgtaagtttatggttttttaatgatgcctgtaattataatttgtgtgatattaagcttgtatcatttaatgtttaataaaagctgtgtataacagccagctcacaaaatgcccgaaaagtgtagccatcagctctcagggtttggtttgaattggctccagcacaccctggcagttagaaggggcaaaatcttaagtttaaggatgctttgggaaatgcattggatgccagtgtacaccaattggctgtgatctcacatccggcttctgcttggaaagatggttgctaagaaaaacagaagtagccccataccaggttcctaacaaaatcagttaggaggagcagactatgtcctggcatttaggtctatcacagtaaacacacaaaaaaatttagtgcaagttctcccttatccccttcacagaaaaattgtttcctatctagtctagaaaaatcaaaccttttagagtttaaatattttaaaattaaaaacttttattaaaaacatacatgtaactcctcacccctttccaatatctgggattaaaagatttgaacagagacctgtataatctcaggcaaaattcatatggattctcattactcagtcacacagtaacctccttcctgctgcagaagctttacagacaatcacagggcatatgaaatgttttagtaatgaagatgaagggttggagcaaatgtctccatacaaaacaaattgactctaggaaaaaggggaaaaatcaaatcaatgtctctgaaacttgagaaacttgtatttattaataggaaaaaagttttgagctcaggtctaattgctatcacatgaaacactattagcaaatttaaaaatgaacggttatgagtaaaaaacaaattggatgctacagagacaaattagtaaaatagaatttacaattcaagatatcctctcagaatacggacagcaagaaaaaaaagatgacaatgataagtaaagagacgacctagagaatagattgaaaagatctaatacatgcacaataggaattcaggagacagcagagcagattgagaagtactaatcaaagaactgagagaggaaaattttcttgagttaaataaggattgcgcctacacatagcaaggacccactgagtagccaaaaacaataagacccaaattgcttggtaacttttcctagggttcaagaagaaaaatttataggtaaccaaacgaaaacaggctactactacaaaaaaattgttttaagccaagtgcagtgtggcacatgcctatagtcccagctacttgggaggctgaggtgggtggatcacttgagcccaggatttcaagcctagcctgggcaacagagcaagaccccatctcttaaatttaaaacttaaaaaaaaggttaataatgactatccttcatagcacttaatgacagaaaaaagattgtggcaacagctatataaaccaaataattgtttatgtttggaggcaacaaaaatttaagacataatgccaaagagtgaccacttttaccttttcagagaaaaaaaaaaaactaaaaatcctccagccaaatgaaaagcaaataaaaagaacacaagtaaaaggaagttgtcttttaaaaatggtagagaacaataatagcagtaacagaaccaatatgcaaataatagttaacatatttatgaaaaataatgaaagacaaattattgaatgagaatatatgtaaagataaattaagatttaaaaaactaggatggatgtaaaagttcaaattgttccaataattctgagagctgggagagagaatgaataattaggcaagtgtgtaaatatttagaagcaatgatgcttattggtacatttaatactgaaattaatctaaatcacttattgaataaataatgctatagtgtaagtcagaaggaaaccatcagcaattaaaaagttatacattaatatcctattaattggcatgtaaataaatctatatgtatatattcaaaatatatttttaaacaatgaaaaattatcccattttattcaatgtgtgtatacagctatatcttatagagtatgtttatgacaattctggaagtctattgggtttagttaataaaattacatggttgatttttttgaatgtatgtttttcctcagcaagcatggaacactcacagaatttgaaaagttaaaagcaaatgtctaagaaagcacaggacaactttaattgggagtgtcagaaagtctttgatgagataccgtaaataagtgagggaaaagattttgaaaggcaacagactgcagcaggaagaaaggtgtggaggggtgtgtgtgtgtgtgtgtgtgtgtgtgtgtgtgtgtttgcgcacgcacatgtgcagcctcagagatccaatcacttacctgaagaacaagtaactgggttactgtggggaaatttaagagttcaagagcacattcagatggtaccttccaggttttttcttgacactctatctttgtcctacctcaaccttcccttctagcccccatcatttgctgatgatagagacagcacaaaacaaaatggtcttaccaaaaaagacagtttcctgcccttgagttttccacagtgtccttgaagtccaaacttctttagaacttgccaaagtccaagccagtttactccagacaatggcaaccctgaacccttcactgagtctaaaggtcattgtttaaagtttttatcttcttgccttacataattcttgtatcttctgctgggggtggggggatgggggagatcatagtgatttttagctcaaaaatctacttaaagggcttaaaaataacaaaatgctggaagttatttacacactccaggcaaactgatttcaaagaaactttctcaaggatcctccttagcaggtaacacagctttgagagatgacattccctactgatagatgtaacaattggattctggagttaagcaggcatccctatggtggcatgtaaagatgaatataataatatctgatcacaataatgatagtaataattacctctcaggccagtaaatgcttactatatactaagcactttgcatatgtcaccttgtttaatttttattgccctcaacttaaagatgaggaagctgaagcttaagtaggttatgcagcaggctcaaagttatgcagctggtttgtggcagagctgggcctcaaacataggtctacctagtgcaagagcccttgctgtgacacatcatgttgtgctgccccaacttatacaaaatggcccagccatgtgtcacatcttagggatcagggacctgtgacaaccttgtcgttagagttacggattcagtgatcaattcttggtgcatccactctggaaggctattcttcatcccatctgctacatttccatctattcaagcactccccattgacctcaattccaccaaccaagcccttccacaactctccagctcttgctgaattgacctcactgatctttcagtgcatttactctctaacgctctcatttggccttagtcttcaacaagaataatcggcaaatatgagaaaagccacctaaaagtcacttaaatgactactactaaaagtctgtaggtagacagttgctggaattggtttggtagtacaacaatgccatccaagactgtggttccttttaggttttgctctgtgtatgggattttcagccaaatgtttactgtttcatgaccacaaggtgactgccccactccagccatcacatttgtattcaggcaggagggaaaaggagcagtgccagtgagctctcctttcacacctttctcttttataagggaaaggaagctttctgaactgcctccaactgattctacacctcactgaccaggactgggttatgtagtcacttctagcttctggtgaggccaggaaagcaaatagctcacttcttttgcatctatactgggaagtgggcagggggaaggtactgaatgcctctgggccagactgtcaacagtatctgccattgttgtatttttcagctctttttctttaatgctttgtcacccctaatagactcttcatcgtgcctctctgattctcaccattacctcagagttctggggcacattgttggtattgtaaaaatatctgcaaaatttaattaagtacaaaatacatatcctagaaatataaggaacattcttttgacactttatttgataaagttttgactgagatacaac

SEQ ID NO: 354 - DNA, 84472 bp, Homo sapiens
acacagagccagatagattcaagcctatctgttctttcctcttgctgtgtctcactgagcacataactattaataaatcaactcatattctgcttaaaaggattgggaaagtgcctcacaatattggcatttctccaaaaacaagaggaaatatatctactataattgtctttttacgttttcaattgttttatttttcaaactagagaacagaataaactaaaaagttaaaatattgtgttctcaaatctgctacccaaatttttttcataacaatgagaaatatatatgctttttaaaaagtgatttcttacaagtggagacatggaaactcaaggttaaaagaccaaacagcagattattaacttgagacatttaagaaacaaaatcactctggtaatatttctgctaatatgcaaaattcatagcttcatattctgacagtaaagagaggcacagacaaagatcatgttttttacatgaaatggaaagatctgtctgatacgaaattacaacacaaaaagggtattaattgtcttactgttgtgtaatgtttatggcaggcatttcaatgacagcactgcttttcagaaagctgtaagaacatgaaagattatagatagacttcactgttaccctgcagaatgtgcccagttcttcaagtaatcaacactcttttatgtggctaccatgcagggcatttcattttatcattgaacaaattttacttttattatgtgccaagtattttactaagcactcagcagtaggcaagatgggtaaggtctctgccatcatctcatgatgcttataatgagcagggaagcagatactaagtggttacctgtgaggaatgctgcagaacataagacgcattacgtggtatcaggaaatgtcaggttctatctgatatatgataagagatattatctttactattgcataatgcatattatctttaggtgtttataagatgggaacttaactaacagtgggcaagtggggagcttaggtggtcaaggaaggcttcctaaggacatgatatttttaagaaacaagtaaaagttagctggggaaggggagactcatgacagagaggacaaggacagcatattcaatgcaaagggaagaactagagtgtcttactcagctcaggctgccataacaaaatactgtaggctgggtggcttaaacacttaaacaacagaagtttatttctcatggttctggaggctgaaagtccaaactcaaagtgccagcacggttgggttctggtgagggccctcctcctggtttgtggacaggtgacctcttgatgtagcctcacgtggcggaaagagattcaactcctctctctttctcttataaggacactaattccatcatgcagatgcaaccctcataacttcatctaaactaattatctcacaaaggccccacctcccaaaaggatcacattgaggattaggacttcaatgtatgaattttggagacatactaacattcagaccataacatagcacaaaggcctgagctgagaaaaagcacggtgcctttttgaaatacagaggactggggaagagtcccttgaaacaaggatagagaggcaggcagaatggattagatgtgaacttgatcttacaagcagtgcaaagccacggaaggtgctcagcatgagtaacataatcagatttgtgttatagattatttggaaagaaagcaattatcaaaggaaatgtcagtttctatctgatacatgataagagaacgttgtactcagtgagagataattgtgagatatttgggtcccagagcattgactctcaaaaagagaaatagcaaaataaatttccacttaagatgaaagtgtctttggcattcaaaacttagtctttatgattgttaacaatcctaggtggttcttatcatgtggtcagagcttgctaaggactgacgttcctcaaatgggtcacagtgaatgacttttcctatatgtcctagtcaatcccaaatagggtgggaaatattatcagctaattcatggagttgatttctattcctacttttccatgaaggattatcacaattattcaattaaaattccataatcataaatacatgcaataatttgtttacactaggtgaagcttaaaaatacttaaataattttaaactgttagcatttactactagtaacactagttaatccaaaacacattgacctagtaaacctttgcagctgtgcacaatagctatcactcaagaacaatgtaatatattatacaactagagtaaaattctacaggctttattttcaaaggactcttactattaagtcttaatgatctgaatctcattgaaagtaatagaaattgaaatgcaagaatacagcgggagttctgcttctggtatgactgagtatacgcctactgaaacctaccctcctgcatgtaacaactgtaaactttaaataaaacagaaacaaaaatacttgaaccttctaggggtgagtaaaagcattcaactttttacaaggggtccaaaatggaagaatggacctatatggagtgagtttcccattttttgaggattatttatttaggctgtgaacctgaggttgggtagcagtcaaggcaccatgcagggtggttagagtcactagaaacacacagtctttctggacacaagaaccttagcatagggttccaggaaaccatagccattagagagaaagagggaactcttagagaggggaaatccgggcaagctcgaaattctgtacataaactatgcccaaatttctgactgacctctgagctccacatgcatgggatatggactgaaaacagcccagttaagaaaaaacagaactgaaatggggctttcacaggtgcctgagagtcagaatttgcagtttgagtccaatcaagttgattacctgctaaaacaaaaacatcaacattattcagaagaatgtaacactcagaagaatctacggtctccacaacaaaacatacacaatgtccggaatacaaggaaaaagtattcaatatctgaaaaactagagaaatatgatacatttacaagacaaaaaacaattaaagaagccaaacacagatgactatatttcacagataaaactttaaagcagctattatagttatatgaggtaaaggaagacactcttgtaatgaatgaaaagatagataatatcagcaaagaaacagaaactatgagacagaataaaatgaaaattgtataagtgaaaaatataataaattaaaaatgtgttagaagggcttaacagcaggatggtgatgaagaacatgacagtgaatttgaaaataatacaagccatctgatctgaagaatagaaaagaaaattattgaaaagaaaaatgaacagagtctcaaggcctcagatctaaaggtctaacatatgtatatttggaatctctgaaagacagaaaagaaagaatagagcagaaaaaaatattttaaaataaagaaaaagcactctctagaaagattcctgttggcacatagaataagctttctcattttaaaaaaaagttttcttcacaagtaacagacaaatgtggtaactgtacttcagaggttaaaacacatttagagaaataatgataaagtagccttaagatattatgaatttagattagagcacagttgtactcctctgtataaatggcaaatctgaatactattgtgttccaaaaaaattatctttcttttaaaatctactaagaatcaagactcaaggtaaacttattaaattcatgttgtggtattaagagtatgctgtgatatatgtagaaactatatgtttaatgccagcaagcaaattacctctaataccgtcaaacattaatttataaattggcctccctgtcacctctcttctttatgctggacgctgatagaggcagtggaagtgaaacagacataagcatgacaattagattctacacaagaaaaatgccatataaaaattcttgtaagatgagtccaggaaatatatctgacagctctgaaatattgtgttcttgtttatacacaatgtaacagaacagcctttgtattatttttaaccgttcctacttaaaataatctatacttcaaaggagagtaaacagtgcataagcttaggttgctctttacctcataacttggttcttgtataatagatattcttaggaccagacaagtcaatctctaaataaacattaacttcctctgtgtttccaaatgtagaaataaagatgaacatacaacatgaggagtttctaacaaaacaattgttaaaaatcaaatcgtgtttaaggccatatacggtaaggctaaaaataatatttaatcgcttgaaatcatacccataacaattgctaattctgcacagttaattgaaatgaagaacaaaggaaatttcagaataatctgaacaaaaaagctttgaaaagttggaggacggtttgtcatattgaacagaatttttagattaactgtcatcagtaatgaagccactcaaaaattgccaagttctgtttggttctttcttcttagctattctcatgaaagtgaagctctactacaggtcttccctgccttttgccataatacatttttcaaaagcatgaaggagatggcattttctaatctgagaatttagtatgaaatacatcaacagtgtcatcaaagcaagtatgcaataattacaaattactgtagtcatttaaaatagaaaataaagattttaatttatataaagcatgcataaacaatttacttgatttcatgaagggctgtcaatatatctagtacacacataatacaaatcaattcaactgaaaaagttttacattaatattcttgttaaaatttattttcttgaaatagagatagggttttgttatgttgcccaggctggcctcaaactcctggcctcaagcactcaccaacagaggcctcccaaagtgctgagattacagacatgagccactgcctggcctaatattctaattataataatatgttaacaattattttaataatgtttcctttaatatgcaaaagaacttttaaggaaagatttgtgttgttcagctttcttaaaagtggtatacaaatagtttttaactgatgtccctttttgttggtaaattttgtacaaacagctcctgtttagctgtccaaggcaggaagctgactgaatttgggatggaagccctgggtattaattaggacaatggttttcctagagtatctattgagatcatatctctagccatttaacatgactagccataggaatttttaaaagaaagaactgacttttattttattatttaattttattttattggagacagggtcttgctctgtcacccaggctggggtgcagtggcgcaatcatggttcactgcagcctcgacctcccaggctcaactaatcctcccatctcagcatcccaagtagctgggactacaggtgcacatcaccacacctggctaatttttgtattttttgtagaggttttgctctgttgcccaggctggtctcaaactcctgggctcaagctgtccatccacctcagcctcccaaagtgctgggattacagacaagagccaccatgcccagcctgacgtttctttttctcactctctcttagctccatagtttaatcacactcaagtgaaattacatataatggtaaactttcctgggagtttaccatgtgctaggcagtgctctgtgtcctggatatgcatcatctcatttaatcgccacaataaccctaccaggtgaatcccattatcatccctattttatggatgacaaaattgaggcttacaaaggtttaggaatttacttgaggttaagctattaagtaacagagctgaaatttaaacttgggtatgtttcactctgcattgcaagcttttatccacgggattactcttcttctgtccaaatgaaggacacctggaaataatgagaacgagcaaacctcttccatcctctctaccaaggagttttcacacacttcatcagtggactctgagatctgcatgtttatgggaaagtgataaagcctgaaatgaaggtaacagcctgggctgtttaaaaggaaattcaaaacagaattattgagaaaggaagacacggtgtcttactgtacagatatggtagggttagcatgcccaaaaaccatccagtaaaaagtgagtgtagcaagatgatttaaacaataatcaagactaagacacttttgcctgttcaatagaatatactattttgattgattcaaccatttcttctcatatgaaacatattagttaatggcttccatcaattacagtgtataacattaagaaatgagcaaaaataaattccatatgtcatttcttacactttagcagctacatttttttcacaacttcttgacactaacagatgagaaagaaggccacttttgctcaagaaccaaaacagagtactgagtccatcgtcaagagatatcagacattgaaaaagatagcagcacaggtttccagaactcttctttgagtaggaaagacttggggaaaaaaatgggccaataggtagcagacatcaactcctacaggacattgaggaaagaagtgagcgaaaaagaccctcacatacttagtttttaaatattacaaactatgaaagagtcgtattatgtgctaagagaataagtaagtatagaggtagaggtaaaagataaaggagaaatggagtgattgagaatccatgtcagagaagatggaataggggattgttggatggatggatagatggatgggagaatatgaatgggtgagtttgatgtggacaaagaaaaatcatctagtccctagggattggatagtgcatttacagaaagcctcatggtggcaggcaaaaacacaagcaagttttcagctactagcctctactgagtaggaagcatagttacctgtaaagagtaaaggcagcaggctatggtgcttaaagcgaatgaggttgtggaagagatgcttagatgaatacaacaaaattactcaacagaattgagggcctggctgatattaaaataccatacttaaattctactctaagtagactctattatcacttggaattactccagcagtcccctgtagtctgagtgtttcagagagtgtgtggggcagggggagatatagttggagagatctactgttggtaatatgtatacatgtatggaagaggaagggttagtttggtgcatagaagaattacaaccgaacagagaaggaactaaagcaaggaggggggtgatatacaagaagagaaaagaaagagcaagtcatctagaaaaaaatctagattaaaaaataaatgcaaaccaaatcaaaggctgagaaagcggaaaggctggcaagctgtgatcagagagtgagatgagacataagaggtagagttgttctaagtgattccagattacaggggatggctgtaggatagggttcctggagaggaagtaacaataaggacatcaaaactgggtcaactgaagaaacatgagaccaaattgcctggatgacaagagttacaatggggacaacaatgactaaaacaggctttcattgtcttcactgcacatggggactgaccagatggtccataggaaacaggaagaagaggagagagaaacaggcagattcaaataacgagtgccttaatgcctgggactgtggcatgggaggctgaatatctcagaagctatgctgaggagctcagaaaatggagtaagatgccaaccatctctctgggttgtggtccttgaggctcaggaatacaagcacatagcattatcatcacagagacctgccccccaacatcatatgagtcgcaagaccctcgtctcagccagcgtccttagccattgactcttctcccattatcctgacactttcacagctttaagtatcacctccacatgagtaacttccaagtttatgtctccaaccttacattctctcctgttagtagttctgaagctctaaatagccttcaagatgtattttcctatactactggccgttaattcacactgaaatcaaaaactcgagagagccagcatctttcccccaaaactctcacctccagcttttcctattcttcccactaatccagatggaaaacatggtgttattttttactccttccaccagtttctcactcacatctatacaagttgtaccaattattcctttgtgatacctctaaggccatccttcctcttacgcttcactaccattcccctaattcaggcccatgtagctgaatatgtgttattacaagagactcagaactctcctacctggtttccctccttacttctttctattctttctactaatttaagatgactcttcctaaaacgttacttttcacatgtcaatctctattcacaaacctcccattatctcccatgtatttccataataataaaggccaagctctgcgcaaacactgatatctcccatgtctccaaaacagcctcccattacttcactacaggaaccagacacaccgtgattattccaattcctcctatccccatggattacatagattttcaattaattcatacttccgattatatttacctgatctactttcactacaaaacacatattttgattaaatgaagattttaattcagtaagattaaaataacctggcatttgtaaaaatgatttcgcataatttccctaatgggctatgaaaatataaattacttccacagttgctcacttttcatttataatttaaaaggtgaggggaccattaatagacatctggagtttagttgttactaaaatcgatttattgtaagatttcaatcctcagagaagggaaatcttactgatcacaactttctgaagtccatcctaagtggttctcttttggagatgatcatacctagaaatgcattacacattcctacatacacacaaaatgtgcagctacagtggaatgcatccatgacaggttgtaaataaaaatgtacataacagagaatccccgatctactggatagatctactttcccacctataaagctctacaaaccactttctacctcaacataccagttatctccaatccttacatccatgtggtgttatgagcttttttttttaaatgaacttctgggaatatacaggaagagattatagaaaggcaaggagtgaggggaagacagagcctttgggaatgcctctaccacactgagtgtggggtggcacaagagaaaaaaggaaaaagaggaattggcaagcgagaggcagaatgtaaggagacaatgggcagtgaaaaagatgcatgcaagaaagaggaagtggtcagcagtccaaaatgcttcagagagcatgagagaggttatgactaagaaaagcccattggatttgaaagaaacagatacacgcctcttgagaggcagaatttagtacagtgatgggagaaggtcagaacacatggagaaggggtgatcagcaagtgggagtcaggcacatgtcattcattcacaaggactgacggagaagggaaggagatggagaacacacacaataagctctgctagcaagcaccttgcccgttttgcttgttgctgtccccagcaccaagaacagttcctggcatgtaatagatattcaataagtatttgttggttagatgttgttgaattcaatcaatgttattgaattaatgaatgttgttgtttggataaataaatgaattgatgaatgaacatagtacttgtatttgagggagtatgaaagaatactcttcatgttaccacatgtaattcaggtctcaatgctggagttatacttagtacagactaagatctggttataagataaaagctgcaaatgcagctcacaacatcagacttagtgtagggtggaggatggagctcttgtctagaggttgaagttaatctttttgacagttatctgagcgaaaatggaatctttcaggccaaacatgagaactggaggaaaatctctgggtgtctgcagagtggaattccctctctgtcttgaccaagaaggcagcaagagattgaaaggaactcctgaggggtggattgttaagaagaggctgtccacctgagacaggcagggactgagttattaagaagtccagacgagtgcctacaatgttgtaaaaaccttttgcagctagaggttatctatctcagtttgctaatggttcttgtcctctgcattaattccctcagttctgcctcactcataagtctttggaaaggtctcgtcagggcatgagaatataagagttcagccaacactcggagaggggagggtggccagcaccatagtgccagcaacagcagcaactagagtggtaggaccccaaacattggggatgtggagtaaccactaagacaacttgaagttaaagggtttgtttttatcagatgacatggtattatcttacaggaaatctaggcaagattttgtttttcctgtatttccttttgtttttgtttgattttgacaaaggcaacttgagcagatataagctgtaaaagaggaaaacttgtagatggcaacagaaagaaggtacagttacaaggaatgtatgtaatgtcattaagcaaagccatggaacacaggaggtgtcatgagattcaaaggcaagatgggggagttggtttttgcaaagtggtataaagaaagattgagagagtagaaagaaggaagacgcttctttgaatctcatatggaaattagggggtaagtcagctgtggggcgtatggaacacagaaagttcacatagctgccttggagaggccaccagagagcccagtgactaagaggcttttgcaaatcttgaggggctagatcgctggaatttccagaaattctagtcagcacaatttaatgctgtctgcagcaatacttggcaacctggaaaggtttgttgcaattgttggaggtgcagtcctacatgtaagccaagctgagctcaccataatggatctaccacatatggagttgtaacaatgggataaactcacacctcatagaagaatcatctcacgatgatagaaacaactctaaagacaggctttcatcaaaaaaatcataattaatccaccctgcttattttcctaacaatggagccaagttgtactattcataccaagatcttcagggagttccaggtggaaggaatattggaagtcaacttgtccaacctgtcacctattatgactttcatttttagaaatccatggaagaaactatcagtgggcactggcatacccgggctcctctacatttctcagcctcctttgcagtacatctgacgctgcatggctgggctctggctaatgtgacattggcggaagttgtgtaagtcactctcaggcctggctctctcagacggaggagaaacagccaagttgcttcacatcagactctgcttgagagagaaatatactttgacagtgttagtcactaatatttgtggatttgtccatttcatcagcaagcattaattcatatcaagccactttttaataatctagcaactcagagctggcaatcactctaaagaaagggatggagattattatcacccatatacccaaaagattaaaatggtggaagcagtcatgaaacccacttttactttgcagtagcacctcaattatctaaaggttattatttgagacataatttgcaaagctaaagcctgaactccctaactgagaaccagaaagtaagcagcaaacatcttaaaacaacccaggctgagagcaaaattaagctttagagcttcatgccctggtaagctcttcaggctagatatatttactcaagttatttcagagtaaataaatcagtcttggaactttgattatctcccatcagataagaaataggaaattggccaggcaaggtggcttatgcctgtaatcccagcactttgggaggctgaggcgggagtatcatttgagcccaggagttcgagaccagcctggggaacacagctggacctcgtccctacacattatttaaaaattagctagccatgttggcgcatgcctgtgcttgcagctacttgggagactgaggtgggagaatcactttaccctgggaggtccaggcttcagtgagccatgattgtgccactgtactccattttgggccacaaagcaagaccttgtctcaaaaaaataaaaaagaaacaaataggaaatcggaagcaaaaaaaaaaggaatggcctggaagggggcaaaacatgccattctgatagtgaaggagagatcaggaaaactacaagaggcaaaacacccaaatcaaaaagcagtgtacagtgccccattttataaaggataattgagtcccactgcccctcagagtcctgaaagcatcatggaagaagcttagctcacacctgatgctaactaataaagatgacttcagtcttcatccaacctttgtaagcttcgaaggaaggtaggaaaacatgtaagaagtctctggaaaaggtaactcaaaacagtgtcagtgtataaagatatacacttggtcattttaaaaactcacttacgagaactaccttattccctaggttgcctcataaagctgttaaaaaaatatatgagacattgctgggcgtggtggctcacccctgtaatcccagcactttgggaagttgaggagggcagatcacctgaggtcaggagttcgagaccagcctggcaaacatggtgaaaccccatctccactaaaaaaatacagaaattagccaggtatggtggcaggcaggagaattgcttgagtctgggaaaaggaggttgcagtgagccgagattgagccactgcactccagcctgggcaacagagtgacactctgtttgacaaaaatatatatatgtgtgtgtgtgtgtctgtgtgtgtgtgtgtgtgtgtgtgtgtgtgtatacatgtatttatatgatatgatgtgagacattgtcagttggaagaggtctgatttagaatgggcagttcctcctgaacctatttaggtgcatacatccagcaggaaagaaatcaggcttcaataagataaatcaagatctaaaagtcaagttgaaaggaccttagagatcatgtagccaagaccctggcaaaaaaaagttaggtgactagagggcatcattcatctcactgtagagggggcactaccgccagtcttgtatttgagagccggaatattatcctccacatcacaatttcctaggccaactcacaaccctctccatcccttcccaagccttcaggttggcccacaggcctgatgcactcacctgcagaaagcagtgtccaaccggggcatgctctgcaatggtggcattgtacacctgcctccagaagatgggctcattgtcattcacatcatctacggtgatgctcaccaggcaggtggcagagagtgggggctctccgaggtcctgggccaccactttcagctccaccgcctcctggacctctcggtctagagtccggatagtgctgatcgcaccgctttcggaatcaatggcaaaagatggtccacactctgcggtgtggaccatctttgattgcagggagccgagattgcagggagccgagagttggactacagtgtagcgcagccaggcgtgatcactgcctgcctcgtcggcatcggaggcgctgacccacatgactacagtgccaggggccgcggcctcggacactgaggccttgtaatgctgttggctgaagagaggtggttggtcattgaggtcagcgacccggagtagcagcgtctcctccgtgctcagcggcggggaccccgcgtccgtggccaccagtagtaactcatacagatcgcggctctctctgtccaggggcccctccacgcaaaggaaaaatacccctggggggccgccgggtagcaacgcgaagtctccctctccgccttccaaggacagagagatgctcccgtctccaagacccacaccaagctcccctgtggcctcatcttccttctcccagtcaccgtccgcgtcagacaccgagacgcgagccacgtagtcgcccggtcgggcgccttcagagacacgggcgacgcctccctctgtgagaaagagcacgtgaattgctggccggttgtcattcacgtccagcacggcgatggacacgcgcaccgtggcaacctcaggctcggcgcctccatcgcgggcctccaccaccaactggtgccaggcctgtgcctcgcggtccagaggtctccacactcgcaccacgccgctcagctcctccaccgcgaagtaggccgcgtcgcccagtgccccgccgccgctacccgccccaggcacttgccgggcgcggacgctgtagcgcacgaagccattgggccccaggtcgcggtcggtggcgcgcacgcgacagacctcggcgcccggctgggcgtcctcgcgcaccgcggcgcggtactcgtcctgctcaaagaccggcgggttgtcgttctcatccagcacgcgcagctccacgctcaggaggccggtgcgccggggtcggccgccgtcccatgcctcgatctgcagccggtgcgccgccgcctcctctcggtccaagcgccgcagcagcaccagatctagaggctccaggggtgacgaggagcctggcaaaagcggtgacggtagtggccccggagtccggtagcgcaactggaagaacgggcctgcggggtccttgggcaggtcggacggttgcaccagggtgtagccctgagtgctgaacagtccggcgtccggatcgtgggcaactggcaggcggaaggcggtccctggcgggctgagctcggagacgtcgagttgcagggagtcgaggggaaagcggggcgagtggtcattcacgtcgttgacgcgaatctccacctgcaccacagcgcccagcagcgtggcggcgacgaagctgtagtggtcccgccgctcgcggtccaggcgccgcgcagtgcggatgatgccggtgtccgggtgcacgtggaagtcgtccagcagcggggagtcatcggagtcctccgacagaaagaagccgctcccctcctgctgctgcgcggccggcagcccggcgcggatgtcacctaccagcgtgtccgggggaagcccctcatctacggaaagggtgaggttgaacaactgggcagaggagcccgaggccgcccacagccacacgtgcaccaagagccagagcagggagcgctgcgtcctggcgccgctgctgcctgaccgcccatggggtgtatctctcctcccggggagcagaaggagcttcccgaccggagcccgccgctgctgacgcccttcgcccatcttccgcccacaagggctcatttctcctccagctccttgggaaggctctcgggtaactgccagcttgtggcaggatcgcagaaaaatccaggagcctcttcagtgtctgagccagagaagaaaagactttgtttggcaaacaaaccgacggcccaggaattcccgaggttacatctgcaactggtgaaagcgtcctctgcctgcagctcacgcagacagggaagtaagctctagctgcctctgccgcggcagccacctcttctgcccctggatttctttaaacgaatctcatctctttttctctctccttttattccctttacatctgttccttgttctactcggctggttgttcccccctggtaaagtcaggtgcattatttcttttgccaaaaaggaggagattatatgaagcgcgcacacacaaggagaggatggggatctggccggagtagggggtggagtaagggcgtggaggcagggagtcagggcgctggggaggagggagagagggaggggggaagggaggtctgcggccctgtccgctgctccgggggcggggcggtggttccccactgtgtctccgggcgccagggaccgcgcgactcctgctccgacccagcctccgccgcctgccttcccctccctgccgtgtgatgcggcgcacacgagggcaaactccaacctgcgagccgcgctctgcagcagggcggaagaggagcaaatgcaaaagcactgggagacgtgcaccgcggggcgggtgggggacgcgcaggcggggcgtctgcctgggcttggccaagtgccaagtgatgatgggtgcggggaggtgagaggagcggcctctccgcggcctccccctccatccgcttgaccgtccctctgcaggcctgactcttggctcgcgctgagccaagagggtagaggttatcatcactttggggtgccaaacttgtgttctccatttggcgagagggactcccgtccgcagcggaaggacagatggagtcaaaggccgatgcatagctggggccaggatggctttaaaggggagaaggcggaacttggaaaagccttccagaaaacccgagaaatctgtggcacacatggtgcaaaccacactttattatgcgtgctactacccagcgacgtgtgagcctcttgtcactcccctctgccaccaggaatgacgacaatatatccgccctgagaaccctttttctacattcagcgccatcataacacttccaggatgtctgacgatgctgactgatgagcagaaagccctggtggctgacaccccgcaagccctcagcgctcccccaccacccctaggcaaggaagtgtgcaagcgggataactctacggataccactttcaaaactagcttctgtctgagccgaacgcaaatgccaataaatagccatagtcgcagatttcccttcaattaactataataatcggtagaaactgatcaatggcctctaataaagtacgcctgagaaaagactctctggactcttaaaaatggctgaccatatttagcaagtggtttctgcaattttgcatttgggcctgagagaagaattaatttcctagataccgtttctctcctttagggaggaccaaaagccctgcatagtggtttcttgcagcaacaacaaaatgcctttttaaatgtgcaacggaggtgtatgtaattgctaatccacagccacaccgttatctctacctgtgaccaaataacaataaaataattgactttgtagcatatatgttaccgaaaatggggacattattaaaataaattcagctttctttcccccaatgaactctctttaaccattaaagagatttgttatgagtctttagagtctttttatcttcagtctctgcatttgcaccctaactagtccctcccctcccactcttgcccctttataagtaattcttttctgtttttgctattgttgttgttgttgctgttttgttttctgagtcaggatctcactctgtcacccaggctggagtgcggtggtgcaatcatggcgcactgcaacctcatggactcaagtgattccatcacctcagcttccagagtagctgggactatgggtgcccaccactatacctggcaaattttatattattttattaatttatttgtttattttttttacttttgtagagatgaggtctcactatattgcccaggctcgtctcgaactcctggggccagtcttcctgcctaggcctcccaaagtgctgggattacaggcttgagccaccgcaaccagcctataagtaattcttgaacaagcatctggattaatgtttttaaagctgtctcaaatcatattacctcctgcttagaacctgaaatgattccattatacttagattataattcagactccttcaatcaagctccttttagtagtacaggatcctatccatctttctgaccttgcctcataccaccactctggactcagccatctgccttctttttgatcttgtacctttgaattgttagaactttccatgcctgggagttcttttttctgctttggaaagagctagctctttctcattcaggtctcaactccaatgccctctgttaagaaagatcttccctaattaccctatttcagatagcctttctactataaatgctatatcctttcagtatatttcattcacaacacctatcagcatctgaaatcaacttgcttttttcatttgtttattagattattacaacctcaaaaccttcattctgctttatctcagcacctagaacagtacctagcatgtagtgtgtctctatttactaagtatgtgttggacagacggttggttgaacctatgggtaagtgaatgcatttgtctgttaaagtagaagttggaagccataaccaagaatgaattggccatgagaatcttcactgtaatgaattatgtctttgcaatcttactcatcttaattatttcataggacttcttgaacttatttttcagcttcgtcaacttactttgtaaaccattgtattagtctgttcttgcattgctgtaaagaacctgagactgggtaatttataaagaaaaaatgtttaattggctcatggttctgcaggctgtacaggaagcatggtgggatcagtttctggggaggcctcaggaaacttacaatcatagcagaaagtgaaggggaagtaggcaggaggaagaaaatgaatggggaggtgctatacacttttaaacaaacacatctcatgagaactcactcactctcatgaggacagcatcagggaatggtgctaaagcattcataagaaactgcctcatgatccagtcacctcccaccaggtcccacctctaacactggggattaccattcaacatgagatttgggcagggacacagatccaaaccatatcaaccatattgttaacaaatatttacttgagtctaaaaataaaggaaaagaagcatcttttactgcatctttcactgacacattctttgtaaacagtggtttagtttagaaacagtggaaaacaaatggaaaatcaagaacctcagacatctattttcctattagttctaaagctttatatctccagcatgtacaattcaaggtctcctgtccatttcacaattacccttcattgaatgtcctgaatatccttaattatagaattaagaattcaattttgtaaagtaagagaaataagagcatttctcagatatgtgaaaaataattttagataatacagaagccaacagcctgcaagaaataggtcaaggtctgatccttgtaagcgaagcatcatggcgtaactggccagagttttagctttaaagttggaaaatccttattctgctctataatttggggcaagttatttaaatcttaagccttagagtttcctcctttctaaattggggatgatacatctaatttacagggatgtcatgggccttaaatgaggcaatatatgtggattggtacctagaatgcatgtggtaaattgtatttttcttgccctctggtgtttgtatgatgaaatgttttaggagtgaattattttggaattctcagtaatatcaaactccgacttcttagccccccagaaggtgtgaagggggaggatataaaattcccactatctggctggatgcagtggctcatgcctgtaatcccagcattttcagaggccaaggcaggaggattgcttgagcccgggaagtaaaaaccagcctaggcaatgtggcaagaccttctctctacaaaaaaaaaaaaaaaaaaaaaaaatttaaaaatagccaggcacgctgatgcatacctgtaagtcccagctactcaggaggctgagatgccaggatggcttgaacccaagacattgagctgtgtcattgccactgcactccagcttggatgacagagcgaaagcccatctcaaaaaaaaaaaaaaaaaatccccagtattgtaaacagaaacttggacaaaaaggctcaaggcatttcttcactttgtgttattcagtttaagtaacacaggaagtccctcttcagaaacattttccctcagactgtaggtagccctcagctttgtgatagttaatttaaatagtgtagttgctaagtgctcaaagcagggttcaaatcacctcacgtcaaccttttaggaaaggagttataattagtattcccatcttacagatgaggaaactgaggttcaggagcattgcaagtcatgtggccaaagtcccacaggtagtagaattggaacctgaacccagttttgctccagtgtccacggtgttcactggtcatttattgtcttcatgattttctttaataagattgtcttcttctgaattcttgatgaaatcagtacagtgatatagtgagttttgggaagacctgggagaactacagaaggaggaacttgtgagcatgttagtgggagtggtggggaggcacaagaggatagtcacatgtcagtacttgaaaatacaaccaaaaaaaaaaaccaactccgtacttagaaatgtacttagaaatggtacttaaaggccagtaaggagaatcgggtgacatggagggtttcttcccaacttctcacgcatggggatggccctctgagggttaagaagggtgcatgataccaggaagcccccatactcccttgactcacatgccatctttctgaaaacgtttgagccaaagagcgtttggagcttgtgatggttaaatgtgatgtgtcaagttggcccaggctacggtgcccacattgtttggtgaaacactggtctagatgctgctaggaaggttatgtcatgctgggaagaaccctaactaatatagagctttgtggaagtggagataatttagtatttaatattatagctggtatttagaatctacatatattttgtgttcttaaagtttttaaaatcagaatcctggacctaatagggatcttaataagtaatcaagtacatctttctgtcttagattctaagccactcaaaagagatgatagtcttttcctttttttaacattagaaccaattccacacatgcctgtatgatattctcaactccacagaatatgatcacattttacagattaagaatctttgatttgaatatcaacatatagttatttgctttgattttggggaagatgaagaaaaactggtcgattatttttatgccaacacttcatcatatagttgaagggaactataacaaggcttatcgttaagttggttttatcatactgtattgaatcatagtttcagatctagtagaagctggaatataagaagtgcgtataccaaagttgtccctgcttttgaagattgtggtatttgtagatctcagaacccctagctaaggtaattcctgcctaatttccccttttctgtcctaacttgcttattctccttcccagtgcttggtaaggcagaccaacttctccccattccctccaacagactcaggatggccgacaaagtccaatcaaacctgctcaaccatataggctctacaatttggcttttctaattctgtctttggcacataccccattttgccttttgtaaaatcttttctttagatgaaataatcccagctcctcattccctcgaccctttaatcattttgtttctgttctctgaactctctccaattttcctatatattgtatcagatgcggaaaccaaaaccacacaccattttctaacaggatctatgcattgccaaacctggggaggtgacttacttcttcaatcagaaattgaagccaagtccaaaaggttaacaagtggatgttggaacaggtgtgacacccccattccaataaagcaacactttctgagttggtaattattcagtgtggaaagtgtaatctacttgctttcacataaaaaattttagaatattcatgtatttgtataagacggcatgatagataaagcaggtgaagaaaaagataaatagcactggatcctgccaatatttttctaagtgctattgttctttgtgagaagttaaggaagctgatctgtttcctgggacaaagtaaagttcactgaaatatatatacataatatatgttataataattccaggcaagagaaagcaaaggaaatacccaggactctgccaatcccacaaatattcagtgagaaaaacacctggattctccccaagccacagctgtttagttggaaaatgcctggttcccattgaatcaaggcagtcagggaaaagggccacatccggcccagtgtgtctactgcgtacgacgcacacacatgaatcctatttgatcaagacacagttattttggaaataaatagttcctgctggattcaagcacagctcgtgactagcacacacagatgggggtacactgagtgcagatattatctatgagaaactccaatacacagatatttggtaagaaaacttatggcacaggtttttgggctctgttactatctcagttatttctctcctggaacatatgtgggtttggcagtgctgctctttgattagggttgcttggatcaccaagatctgagcatgtccatccagattctttaggtcgagcagcgaatatatgtaaaatgaaatgcaaaattgataagtcaatcttgttttcctttagtatacaatcaacaatatagtagcataatcataacaggaaagttccaggactttctgaacatacgtgaattaggaaaaatcctatatctctatcatcacaatgtacactttccacatattcccatcttttcctttattggcataaacttcttttgtgtcaaaaggacacattttcactacattttccaaataacttttcatcaatccattattttaaaaaaacccactgttggccctgaaattaatctgaaaattaggcagatatttccaatgaattaagtaatcatttatacttaagatttacctactttaaatcatacagaggtttcttattgttaacataatttataaggagtgagtcagtgcttaatccctttaaaggtgtttttagtttgctatccaaaatcaacctgaggagagaacctgtgttttgagaaatcacagacttcacatctgagggttctagaatcctgaggccttgggagaatttcttttacccaattacttgctccagaaatcaggagaggttatggtggaaacagcttcatgaattcaggttctcctcatctttcctctgttgactgccaattccttatttcccataactctttgtatctcagtgcaaaaaaaaaaaaaaaaaaaaaggagagaaagaaaaatggaggaaagatattgcagaagcttctagcctcaaaggatgcattcaattaataaacagtaatctttcaggaaagcaaccctaaatcccctggtcaacaatgtccattctgaccactgcacattgagtgttttagccatcaagctgacctccagggtatctgcagtagcattactgcatgtgcaggagcttctcttcaaacacagcttcctgtgtttgcaaatgtatatgtataatttttttctctgacttcacggacttttatccccgaccctgtattttttttttttaaataaacgtagcttccacgtttttgctgtgtgctttatcttgaaaatcctttttgaaggcctccagcctctcttctcatgcattttcatccccagtctgccctgtttcacctgtgggctttattcactgttcttccttctgttaagccctggtctcttatccaggcataacggagaagcttaaaaatggccataaaaaatgtagtttagaagagatgctttaaagctcaaattgtaaagcccttcagggggcacagatgaatgttaaatgctgggaagcaaacaccagtaatcagagatgtaatcgttcatttttgagcaagtgcattgtgtggcccaagaggaaaaaggcagagctgtaaacggctgcagagtggccacagctgccaatccttgaactttgcaggtgcccagagtgaatgattccaggaactcagctctccttctgcaagaatatcaccagcagaaaagccatgttcacaaatcaagggaacttgaaggattattctagacctaatctccatagtcccctgtggtaggcagaataattcctccttccctacgcccacaaagatgtcttcgtcataatccactgaacctgtaaatacattacttgacaaaagggactttgcagatgtgattaagttaaggagtttgagatgtggagattgtctaggtggacccaatgtaatcccagggggccttagaagggaaaaggggaggaaggaaagtcagagtcggaggaggagatgggacaaaaggttggagtgaaggagccatgagccaaagaactcaggcagtctctcaaagctggcaaaggcaaggaattggattctccccagagcatccagaaggaacacagttctgacaacaccttgattttggcccagtgagacctgtgtgggatttctaacctacacaactgtaagataatacatttgtgttgttttaagccactaaatttgtgataatttgttacagcagccacaggaaactaatacaccccttggcagtgccgagaccagtttttcctcttccctgaattctctgaagtaaatattcacattcccagtgccattgttccctctcaaacatgaacatttacgttctcaatgaaaagaagacagaaattatcacagcatcagtttttgcctccagccaacagtatctcaagagatcaattcctgctggaaatttgagcagattcctttcatagaaagtgtctctcaacagtgtcaagatgaagtttttctttgatttaaatgcattatttgaagttatgtctttgtaaaaatgttttttagaaaaaaacctgtcacaaaacaacactcatgtttaaaaggctaaagatataacaatcatgattgttaaaactttaactagctgtgatttggggataatattgagttagccataatttatcagagggagagactagagtctttgggaaagagagtcaaggacacaaaggttctgtttaaatcaaagggcttgacccaacagccagaaaatggggttctggttgtactgtggagagaaataaatcccgactgtggaaacaaatctaagtgctgtataatgggccatgaaatctattcaatgggagtcagtggctccagaggtgggaacctgctagtgtgtacacaaagaatctgtttcttttcatctcctcatactcaaatggaaatgtggtggtttccaaacttttctgacccaccttaaataatatattttatatcataggccacatatacacatatacaatgtaattaaaacagtattttcatgacatcttacttacccttgcaatgtgagctatattctgatatttcctaattcttcttgttatttttcactgatgttcgttcatttacttatttttcatttttaaaatgctagtcaggatcatttatttatttttcatttttaaaatgctagtcaggatcaactaagtggtcatgacttggagtttaaaaacatagcttcagtaggactattatcaagaaggtaggtattttctttgggttgtagtagtaacagctattcattactacctagtaacttcaaacaaaatgatagcttggaactcaatacctttaaggtctttctaagtctataatttatagtttttcatcaaaagaaatattactttatctaaagtttttttaataaaataaagcaatgactaataacttgaaaccttctctccagcaagtttgtttaatttaaaaaaatggttttactaaaataattctgattccgttttggtcttcaattattagttctaaacaccaaacatgtctttctaatgaaaatcaaattattgaaatttttgccataccttttttgtcacattgttcattggtgtttctgaattttgatttcaggagttggggaactagaatcactcctaagggataaagcattttgagtcacttccagagagtgttttgatttatgctgtagccaatatcatcttgaaattgtcctccccttctcatcactaatattgctgaaggcaggtgaagctagtgtcctaagactcacagagaaactgctcactttcactttgtttttaacaattatgctgcacaacacacttgtcagattcttgcctgtaaaataaaagtgatgctaaactctcagggctgaagaatagctaataaattgtgctaacccttcagagatgcaaaacaatagcaatcactcatcagtttgctgagaggtgacagattccaatttcctatttttccagagacactctcctcattaccaagcaaaaccagaccggttaacttgcccaagatctatagcttgctgcagtgatctcatcggtctgtgtccctgatgggaactcaagcaggtggtgcggagagcagcgagatgacatacggagacagattgccgaaataggctgatccaccaggccaactaattttccttctgagaagagcaattattttaaattgccatatatcaacatgactttgttcttgccactaaaatataacatcaataaactgtaatgtaaatgagtgcctcctgctacattgatttttaaaaattaaagattaaaaaaattaagaagaagaagaagagctcacattgcttcatttagaattaagacaggatcacaattcaaggcattacaacattaagctgggatgtgtaactcacactattttagaagccttttgacaatatcacaaaactactctgtaactttgtttttaaatcgtattaattctgttgaaaagtgttcttttgtgtgagagaacacggtctcttatgatagatacaaaaataaggatgctggaaagtagatgttggatacaagagagattaaaaaaactcacctgcccaatctgtctagaaccagaacttaggctggttcaatcaaatactccttatgaaagaaatgcattcagaattccaaataaggattttgaagaaaaattttaatatctgtatttagatttagtggccctaaagggaaatagggtgttgatttatgaaattgagagaaattatgagcagctggaacattaagggcacattgtcagagggagttttcattgccaatttggaatgaagttccagcatagtccagtgccatgatttaaacacataagatcctagatgccccaatctagttaatttgagcatatgtaatatccaatccttggattatttgattgacagagccattaaagatacagcagttaaagatagatacagaatgtagttaaattttattacattttacagttttttctttagagataactatttttaacttatgatgaatgatttttgaaataaaagacactttaacagaacgactaagtaaaaataaagtctgaaaatctttttattaattctagagagcttgacaatcaaactacaaaactgttcccaaggtaaagtatctaaatgcatataagcttcctcatgtgggctgagcttgcagcagaaacataaaacaagaagaagaacgtctcagggtagacaaagacataattatcttctatattattgaataaacactttactgcataataaatcatcttaacccctttttcttcaaattcggataaaaattgttttcccggcttcttgcaaagagcttccaaataatacatccattcctgatctcttggttttctcccagaaatctttaaatcaaatcaagataagcagtttaaaccattgaattcgttctgttatctttaaggattttctctaacattactcttcatttgtctggacaaacaagttacctggggttgtggaggacctacacaagaggaagatcatttggggtatattagactaccacaagggggagtgagtgccaaatattttcagttgggattttagaaggaaaccatcctgacctatgaagtatttgtattaggaattcaaggaagaatctggtggagaaggtcccttccctggaagaacccaggatttagtaaggaagtaggtaacaaaaattaattacattacaagacaaataatgctgtgggaataaagacttatggaacttagaagacagcttcgctttcattcatatccaatctggctaacacagttcattgcttcaaccgtctcttagcaacataccttaatatccttcgcacccagtccttccaaggcgtcgtccccttccacagcctcctccttccccacatccttttggattaatccaaacaagtgtttccttttgtttggccttccttgagatgctacctgctcctgtctgtgtctcgccgctgctgtttgtttcctgcagcagcacttatcactttctaaaatgaacatctttgttgagttacctgtttattgtccgccttctctctaaaatgtgtgattctggtgaattttattcacttctctgtcctcagtgcctacaaaagcattgactgaatttatgaattcatgcaaactgatatcattttaaatctataggttccaatcccaattgggtccccactgctgttcaacaaacctttagtcaacaaattcctttccttgagttataagaacctccttcaccactgttataaattcacttcagcaaatgatctggtccttcacaccccaatggcagcccctctaaggacctcatgggtttagggatatttagggtactgttcggtctgtctcatagttagcatctctgctgcattaggcaaggtttcccagtctctcttttaaatccttctcctgtggcttacacaaaaccattctctcttggttttcattcctcagacctgctggatcaaaatctccatagacaagacccaagtgtgtatgtgtgtgtgggtgtgtgtgtatttcaaggcagagtcttgctctgtcacttcacccaggctggagtgcagtggcacaatcatggctcattgcagccttgacctgctgggcttaagtgattctcccacctcagcctcccaatagctgggtctacaggcatgatctgccatgcccatctaattttttttatttttatctttttagtagagataaaatctcgctatgttgcccaggctggtctcaaactcttgagctcaagcaatcctcccagctcagcctcccaaagtacaaggattacaggcatgagccactgtgcctggcctgtttggtttttgttttaagagccactgataaacaggtaggactgacaacttcttgtggatttcttctcttctccttttcttgtccagggacagctttaaacttagcaactgggtaaaagccaaggtaaggttatagggggctgggcttgcgggggacagattttgccttaaaactgcctttgcatgacaaacacatctcttttatttggattacacgtttccagatcattacaaatgggaaattttaatcaagatgcccatatacacagcttacataaaggcaattgtaagatgcatgtattcaatatttacatgtttcagaaaatattagttgccatatagaagaatattgctatgccatggtgattatcatttggggggaaatcatttgaagggatgctgcctcagaaggaccaggcgccaaagatgttaaggtatgttgctaagagatggggtgtccccactattgacaccccctcattttcccactctcttagcttcagcttcagcttcctacctagaccccaacgatactcaaatctatgactttaagaacacatagcctctttctccctcaaatgtgaattcctcattctcaatggatgacgaatcttttccaactgatacttaacaggacccattggtatattggggctggtatttttgggggctggtatatttaacaactgttaaataccagccccaatataccactttctctcctaaacttcctttctttcactgagtccagtggactatatttttgatttaaattttttctccatctctccaccatttcttgaatctggataatcaggtcttgtttaaatgattggaattgctttttgacaagccagcctacctccaatacctaaacatgttccatccctccactgacaaactactaaatacttccatagttatctttccaaagagacaatccgattatctccactaccttcccctcttgttttaaaacccttcagtggctctcccattaaggactagagtcatatctccttattcctgcatgcaatgtcctttgtgatcagacctcggctcatttcccaggctcatcaccctcctgtcctccccaggccttagccagctctcattatgtgagagtttgagaagatgtcactaaattgtagcctttcaaatgccttcaactcctaggcatggacttatgcctccaaaaatgcaaagtaataaaatgtggaaaataatcagtttatttttatttgcgggttggttttatttcacatgctaaggttcttctaaatttattctggcttccctgcagcaattctgcccaattccattttacgtgaaataacagcagcaaagttcagaaatactgccaccttgtgatcacagagtaggtgaaaagccaagtggtcctccctttataaacatgtttataaacagaggagctcagaactggagagattccctgaccagtccctctttccaggccttaaaactaacaaccacttgattactgctagaaactcaaaattacaaaactctacctttagggtctactcttagtgactctcttttgtagagttttgttggtttccctcccccagattatttaaagatactgaaggacccacttatttaagccatcttcaggttcaggtcctttgaagcccagagaacttttttaagccttttacttttaggaggtatgtgctccagaccatagctgtcaactgtattaggacagcagtgagttgatgctatttgacaatacaaacccaaaacagggcgtgtaagaagtcctcaagagctgcttattgagagaattaatgaataaacaaatgaacagcagatacgatgacgattttaagagtggagaaaaatgtttctaatatttttgaaagcagtcattttattttgaaatgtcaagtccatcttgaaacattgacatattctatactcttgagctatttaaggtgggtttgaataaaagaataatggaggtgtagagaggcgaagtgacctatgtctagtggcataccaacaataaataggttcagggcaactcagggcattgcaaagatgggtgaggctgaaaggaaatgtaaaacatattcattcaaaccccttttgatactgctttgcaaaaacaggttcatccagttcttcctttctctctctctgtctctctctctttcttgagacaggatcttactctgtcacccagactgaagtgtagtggtgtgatcatgactcactgtagcctcaatctcccaggctcaaacaattctcaggcctcagcctccgcacctggctaatattttgattttttgtaaaaacaggtgcccacgctggctcaaattcctgagctcaagtgatccatgcacctcggcctcccaaagtgctgggattacaggcaagagccacaacacccagccttcttcctctctttggctctattcttaactattatttcatcacatagactagcttattttttaaggtttgttctcagaatgattgttttcaaatgacttagaactggatttctcataagcagcatagtagccactggagacttttgtacacaggtagagaataagctgctttgaaaagtcattggtcattccaaaactcatttgtatcatgagacatcatagaatatatgctttgtaaataatttgtttttcagagtcaataactaattaccagttcatgccctataaataaatccatattggaaattatgtctaagtagattcatcacagaaacgattggccgactgaccaaacagcaaacttcatgatttacttcttggcttagctgctctctttgcatttcttttttaagcagtcctcttcccccatcattattatagtaaagaaggaaaatggacaaggtgaagcaaggctagacaggtgtgaatttaaaaatcactgatcctagaaaatgtttgcagcttttgggttgtaagaaagtgaagtaggcctgacatgctggctcacgcctataatcccagcactttgggaggctcagtcaggaggatcacttgagcctaggagtttgagaccagcctggcaatatacggagatcccatctctactgaaagtacaaataaaaaattagcaagtcatggtagagcatccctgtggtcctagttactcaggaggctgaggtaggaggattgcttgagcccaggaggtcgaggctatagcaagctgtgttcgcaaggaagaagatgaagcaggttctgtgacacagaacagaattcagggcaagtgcagggctgggcagcctcacactgtaattcacactcagggcaataaacagaaaataattttcagaatgaaatcatggcattgatcttgtcatcatctcgagcacttgagattttgaaacaaattaacattgtctccttaaatgcaaggtatccttcttaggctccttaaggaactttgccatttaaaaaagttaagttttcaagataaagagacctactttggtcacagtgaagattatgactagccaattggcaaatgccagaagaaatccatgtgtttcttttcctttcactctgcccatgttccacgtatatcagttccacttagctaagttgtctgctccttttgacttgctggaatatcacaatgcaagtctggtgggcacagaaattctgggatggtgtctagccttaattaaacacccccaactgtggtgcagtcaaaccttgagattttcatgactactgagacctggacaaaaaacaagtattttttgcccagtagagttgaaagccgaaataagcaaacaagaaggaggaaacatataagtaggagattgcaaaggcagagaggtaaagatggcttagctccaggtggtcaatgatgctctatccagatgaggggctttggggcccagagcctgcatgtcctgatgggttttcaattctgagcacaagatattcatctgaaatgttaattttccatgttcagccatttgccatccggataaaattcccagcacagcttctgcacaaactcaggataaggtggcaagctcttaactgccttgactggtaaaccatgtaaataaccccttttcattgtttttttccacaggcaagatagagtagtctttctaatattaacttcagcataaatattgaaactcacataacttgaatattgaaaaaagcttccaaatggtctttgaatttaaatagcaccttgagactcccagcccccagaacagctctaaaattcaaatgactaaccaacttgccattctttgccttctctaatttccatatttctttttttttgtgctaataattagccatctcccacattcttgatcacatgtaaacagtagaccaggcatggtggagagagcagctaattaatatcattcagatggaagggctttcattttctgcctgcttttgggaaattattccctggaagaatttctttgtatggagatattggacaatctcctatgtccatcctgtggacaataggagatgttgtctgggctctgtaacatggatttgatcattccagctgtctgcttttagcagtgtgcgataacacatggtcagatggcttgccctgccctaacatatgcacgatcatggttcaatatcacttcactggagtacccaaatgtttctggtttacctgcaaaaaattcaactttttttaaacaaaattgggaaatagtataggtcttgtacagcattccagtcatgcaccaagcacacaccaagggttgtttagtaggtggccccatgttgggtacagttctctccctaaaactacaggaaaggcactccattctcacacattggatccttcttgcactttcattctcacacataacaaatctcccacaggcagacagttcgcaaagaccatatggatagagaggcattttgtcttatttttaaattttttttttttacaaaactgatatgcagatttaataaactatctaacagtattgtcaagggagttgggcaaaattttcagataattatatttggccccatttcacatgaaaatatcctttatgacttagagtacattcttggtgtatatattttaatgtattactcacattctgccttttaaataaaatatgctgaacttgaagtatccgccatgaatctttgatgtaattaaggatatctgattcttccactccccaatgcccccagggcctgcttaggtatttgaagctgtttcttgctacataaaacatcccagactgattttttgggctgtctttttaagttgtaacatactttgtttcttggagccactcttggtgttttcattgtgttgatttctggtggccttgcttctgaatattttctagattaagccttgcatggctgtgataggtgattattttatacttactagcacacagcaggacatttatacatatccacatttatggctatcttgatagttcattattttacccctaatacatagaaaaatccaagttttgcagaacaaaacttggagatgtgagttctggtggtttcaggctcacttatttgtggccctgtgtgacatgttgggcaggatttaaaacttgtactaataaaatttaaaagagctacaggtcacacacttcaaaaagtagatatgcaaatgacaaggatctaatacattgcatttatacctacaatcacagatgatttaattaatggcaattcaactctcttcaggagccagtgagtaacataaatgtgtgaatgagccaaggttaagacagcagggagtaaatgaaaccaggagtgcgtgcccctcctaataatacagataccttgagaattcgtgctggtcaggcaaacacatctccaagtcaaatatggcctctggagcattgtaattttattttttgggctatctccatcactggtttgcttggttttttttgttttttttttttcttctaagggcaacgtaacatcatttgccctcatatgggcaagatcaactgaagagctttttctttttgaatgttctggtagaattttattatggaagtgatcttcctttgaaagtgtgaaacagtatatagttaacacaatatggtggaagtgctctgataattgttttagttcttctgcagtttgggggatgttcatgacactcagggaggaaggaatatggtgggtgattctgaacaagggccccagagtcagactgcagaggttcacatcccttctcctctagttcccagctggacaatcctggtcacatgtgctctccttcctaagactggggatttcttcatctgtaaagtaggatgggatgccaggcatggtagctcacacctggaatgccagccaaggcgggaggaccacatgaggtcaggagtttgagaccagcctggtcaacaaagtgagaccctgtcgctacaaaaaatatatatattgttttttaattagccagatatgtgtgtgcccacctgtagtcccagctactcaggaggctgaggtggggaggatcactgaaccaggagggccatgactgcagtgagccataatcgcacaactgcactacagcctaggtgacagagtgagacccatctcaggaaaataaaaaaagtatgatgggagcagtgcctacttcacagaattggtctgaggattacatgagacaaaggaagatctcacaacagtgcatggcaaataataaaagctcaacatatgatggttatcaccattatcatcattatagcattatatttgaccttgtaactaatgtgttttctttattccctgtgattctagtattttctagtagcctctgtgatcggcacccaattaatcaaaggcattcattgttcccaggaggaaggtgggtaaaacctacaacaaagacatcaattaaagtgctaaattaatttctgtccctctctaacataaataacaaactagaaagcaaggcattcatttgcaggaggctggctttgttaagagagacaaagagttgtgtttccaaagagctagagagtggagcactggaggctttgggcatgcagtaagtcacagggagagtaagaatgcacacgtgtgtgaacagtttccctctacacggaggacagacagcagccgtccctggagggctggagggaggatggaaaagaaaggagagagcaaaggcatttagacaccaacaaaatggtgactcgctgcccctccccatcccatacctcatccccagcatctacccccagaaagaggcaatattgaacccccaagtttgttttgagtattcaaaagtatggaaaacccgtgccccaattcctgtatagcgctctaggagagcggtttcagagtggacagtgtgataccataaacagtagagaaaaatagctgcttctcagatttcagacataaggaagaacatgcttggatgtctaggtgtgtgtgtgaaggatgagggccccagaaatattttcgtaagtttaaattctgacctgactgtatttcaaaccagaagcgactgagttttgttgaactggcaaggttgtttttctaccactgggccaaaatagggcttgcagtttgattagcataaaaataaaggaagttaccaatctgagtctaatgaatgtttaaaatgcttccccttttattatgatctattcattgatttccaggaaggtgttttttgcttgcttccctgtgctctggattgctggctgctggctctagttattaaggaaacaagatcatgaccctgaaacctttagacactcaaccaactctgtgcatctgttttttctctgccatgatctgctgtctgtattttgcagccacatggaaagagcaatgttttaaaccttcactagtgctgtggatcaattctggcttggattctcatttggaattgattccccttgggcaggaatgtgggtgctatatcactccctgagcatgtcagtaaacatcctccctgtcagcattgctgttcaatcatgtcttgtccagcaccctgcgggtacaagagatcacagagccttacatttggccatttcctaggaagccacacttttatacattaagtcaaattctcaggtatctcttggttttgctctattctcacctctcaagctgacatatattttctaaaattaagtcttccagagacttatctgtaaaaatattttcttaagaaataattttcattttatggaagaagaaatatcaacttagaactactttgtgacagcatccaggctgggtgtgatggctcacgcctgtaatcactttgagtggctgaggcaggaggattgcttgagcccaggagttcaagaccagcctcctaggaaacatagtgaaactctatctctaccaaaaaaaaaaaaaaaaatacaaaaattagctgggtgtggtgacacatgcctgtagtccagctactcagggggctgaggtagcaggatcacttgagcccaggacactgaggctgctgtgagctgtgattgtaccactgcagtccagcctgggcaacagagggagaccctgtctcaaaaattaaaaaaaaaaaacagagtaagatcatccatttttgataggcacatattgactgcttggtcccatagccatgtgggagctaaggctccagttgggggatctgtgctggtagtggcctgagctggatatttcactgatgggtccttatgtaatcatccagtgggttctttctgcccaccgcacagacaaaatcaattcactgagatcatgacattgcagtaaagatggagtttaatccatgggaggccagccaagagggaaacagagctattacttaaatcagtctccctgaagtcttggagttaaggtttttcaaagatagtttggtgggcagggggctggggaataggtgctgctgattggttgaagaagcaatcataggtgtgtggaaaatggtcccatgcactgagtctacctctgaggggggccacaggactgactgagtcatgagggtccatgtggagacagccagtcatcagaaatgcagaaaaaacatctcagaaaaacatctcaaaaggccaatcttaggttctacaaacagtgctgttatctataggaggaattggagaagttacaaaccttgtgacctctagaacaatggtcagttattaattacacctatgtcttctcagaattcaggcccctatctcatggtcctaaccttgtggcttttctttagttttacaaaggcagtttagtattcggaaggattattatcatctttactttaaggttaaactataaattaaattctttccaaaattagcttggcctatgcccagagatgactgaggaaagctctgaagttataagcaagatggaatcaactatgtcagatttctcttgctgtcataattttgcaaaggcggtttcactgttgtctaatacccaggtcctctcaaggtctcagtccagatggatttagaatacaggatcactgcagtccagttctgcttcatcttatcctccaaggcactgagttatttcatgtgcatagggcatcaaagcagcttattaacgtggtgtataagtagaaagaaaagagactaggaaatccagaagaaaatcctgttatatcttttgaaattcgtattcattcccaaacatgaatgccagcatttgctcatgtgctggccaactaatggaaactaaaaatggaataaaaaataacaatgtctaaggctttcagactatcccatatcaacttatcttgaggtagaattttattgttactgacctgctgctcctactagtaccataaactttcagatttaaatttacagaaaacatcaattgcatgattgtcccaaagttcttgtcctctcccattcttgccctctgcaactcttagttgcattcataatgttaacttaccaatttccaaaattccttcttcaattggataggactatatgaaaaaaaaaactaatgtgtaaatatggtgagaaaaatctaaggatgtaagtaaaattcagagaggcaatttcaatgcccctcatacaatgaaaccctttctacctgaaatttctctatccaaatgtgatctgtggacactctccagagcagcctctggagcagcattgaactttctggaatgaaggaaatgttctaaaactgacctgtccaatatagcaaccattagccacatgtggctattaaacacttgaaatgtggctggtgtgagtgaggagctgcttttttatttaatttcaggtaattaaaatttcaatcttttaatttaaatagccatgtatgatatgataagaaatatatattttggtcttctttccccatttcttggcacatagctcttaaaacccttgcaatctctgaagtaatcacgtctttctatacactaatgagatgactggtgtctgggggctctggacagcctcagaatagggggatgggtgccagggaatacaaccacatgattagagagtcggaactttgatctccaatccccccgcctctggaagagaagagggcctgaaggttgagtcgatcccagtgctcaacgatttgattaattacgcccacaagatgaagcttccataaaaacccaaaaggatggggtttgaagcgcttctgggttggtgaatgcctggaggtgctgtgagagagagtggcccagagaggtcatggaagctcctcatcccttctcccataccttgaccaatgtgtctcttccctctggctgtacctaaattgtattctttgtaataaactggtaatcttgtaagtaaactgttttcctgagttccgtgagctgcctttgccagagaggacctgttattattagctaagtcagacggaagttatgggcaacctggggctcactacttgtgattgacatctgaagtgggggactgtcttgggggactgagtccttaacctgtgggatcagatgctatctcctggtagatggtgtcagaattgggttaaattgtaggacatccagttggtgtcctcagagaattggagaattgcttgtcataggaaaaagctctacacattttggtgaccagaagtgttgtggtggtatagaagagaaaatactggttttccccctaaaaccatgaggctagtcgctgccatttttgacagcactactgcagaggattttacttttaaggttagaaagagcaaagctccaagggggtgggagggaagaggccccagcaccaggcctaggcataaggtaagccactacattggaccttgctggtgactctgtttggagcttctgagaatccccaaagctgacactgggagaatggaaatgggctaagatgccctttatgaatctcttccaggctcatgagaattctgctctattcattgtgtaattgtagtttctcccttcctccagacatttttctcgtttggagaagtgttggttgctaggagactgaactgccttttcaaggagagtactttagagagaaacaattcacatgattttcttcttttataaaatgaaaatttgtaaaatatttgcaatgcatagtgaaaaagtcaagcttttacatttctttgtatatttgttttagcaatcatagaaactttcaattacttttcccactgcttcacactgcaagaaagaaaacaaaaactgactgccttttctgtagcatttcttaaggaaaaaataacattccaggcttgtttccagaaatggtgaggtgatatcttatcctgcttacctcacaagggagctgtgagtgagaatcaaaaataatgacatttataatggaaatggaaattgcaaagcactatccaccagaaataaatcagtattgcacccaacagctcatagttttatccaactacttattcttaccatgattttcataaacttacaaaatcatgcagtctgaacacatcatttaacaaataaaagagccacaacttggagaaatgaataggtctcttaggtttctaacttccagacaaagatgccattatactgcaatgacttctcagagaatgtgaacaaaactcctttaaatgttcgactagctcttgtaatcaccatcaacaacatttaaaccttgggtagggagtagtcagcatgaaatgacatttcctctctaactcacctaatacgatgcctggcacacagtaggtgctcattaaagagtagttgttaataatgatggtaatatcctagctaataaggatcttttctttcaaatttcttggcctctgctttaaaaatccagctgtagtaatttttttattgaccaactgcaaaattctttcatgtttgagaaatttgcctatgttaattgacagtttaaagcaaaagagctttctttctttgtatatctgagcagcagaagagccaccaaaaaggagactaggaacaagttattttacaaagaaatattttggccaggcgtggtggctcatgcctgtaatctcaacactttgggaggctaaggcaggaggatcatttgagcctagaagtccaagaccagcctgggtaacataatgagactgtctctacaaaaaacaaacaaacaaaactatctgggcatgttggcacacacctgtagtcccagctacatgggaggctgaggtgggagaaacgcttgagcctgggtatttgaggctgcagtgagccgtgttcacgccactgcactctagcctgggagcctggccaacagagcgagactctgtgtccagaaaaaaaaaagaaggaaagaattcataatgtaagaataatatggttggaagaacctatttgataattatcatagatgctatattttttcaggttatccatggcttttgtggagtccatactccttagaaagagttcagcacaggagagcaccccgtgggtcctcttttgctagatgagctagtattttaaaagtacttagatgtagacaagctcctcagggtgacaactagcttacaaacagcatcccacaagcacacaatgccagtttcatactgccccaatgtctccagacctgcctagggtctcaaccgtgactaggcattagaactacccagtgaactttaaaaaatatgatgtcccagcccagatcaatctgtccctgtttctgggaggggaggcaggtctaggcggcttttaaaactccctgggtggatctaatgtgaagccagagttaagaacgaagtccttaagctgttctgattccaggtttctttgatctaaaccaaacacgtgtaggtccacagcactagctaaaagaactgaaggatcaaaagtttctctgccccatctgaaattgccaacatcagatcctcactgaatctcctgcgctcctatttctgctcctctctctccctctttttctccctgccttactctttccctttgtccctagctttcttctctctcttgctctcatctccttttctgtctgtctccttattctctcagttctgctttgagaaatcttccccctcaataatatgcctttgatccctttcactttcttcctttctgatagtttatctcaggaatccacctttcttatttttcatttattgttcgatttttgtttcatttgtgagccaaactaaaagattgtgtgtgtggtgagggaagagcaggagggctggagggcaatgatccagacatacacataaaaacattgaaaagaaaaaagttcaaaaggaatcaatgccaccaactttcaaagcacttgaaagcagccacaagtcccattccaaatctccctatcctgctctaattagactttcctttccttaatcaccagcattcaagaaaacaaaaaacagaacaacaaaaaaaaccccactattttgtttttaatgtagtttaatgttcttctcttttaattaagggtactacaacaccactgtgctagtcttggctgctttcagtattcagttctccagttcagtggctgaatgcctgccaccatggtggctgtagagagctgcagattgagaaatttaagatcttaaggaaaaactgtttggaggtcatcaagattgagagtaaaaccattagtaatgataagttctataccatgaatttccatttgacatctcttgctctctggaatctcttgaggatctcccacataggccattttagtaaggtgctcataaatctgtttagcattgttgaagataaaacacagaccaaaatgcattggtctctgtgactgtactcccatcccaagtgccccacatattcgacagtttcacccagcgagtgtttgtgcttatctctgcctccgctgtcctcagtcctctgtgctggaattattctccagttgtcacatgtgctccaggaacagccatctgagactgcagctcacattctgcgctcatttttgccatccctgtctatttctcccattacctcatttaaccctggaaagagtgacttaaaacttactcaataaaaagctaattccttgggattgttgtaaatatatacagaaaagacttcggtatgctaggatttatatatatatataaaagaaaaaaggggaagagtcagactggttcagattccctgggcttttgccaactgacctaggaacccagacacaagaatgggaatgtttctggaaaatgcttcctgagttccaaacaaccaacttacagcaaatatggggcataaagtcagcatacagctattcagtcaataattgctgttctgagagttgtgaattgaggactgcctaaggtgatgggaatccaagcgtgctgtttgaataaataagacaattttggcttgtaaagccttcttagcctgtgggggatgcttaaatggtgctggctaagattatttggagaatcaacactgacggccttggggatgagagaagtcaaaggaggaccacaccagggaagtggatgggttccaacagtttccacctccctggtgtgggtccttgctgctgctgtcaccctgtctcagacttccttgttgccaacaaaaactaataataacctgactcctttcaggaaaccaaagataaaggaaaacaaataaagcaggattcaatgagctaaggatcaatcgtttaagaacaataatctttcaaaccaactagctaataatagatgcaacaaataaaaaataagcaaacatgatgaaaaaagcaaaagtaatattaaaagagctcaaagaataactgaaagaataaaattttaaataattcagagtacatttaaataaaaatactgtaaagaataattagtatggtgaaataaacaaatctttattaaatacctattttttctttctttttttttttttttgagacggaggtcacccaggctggggtacagtggtgtgatctcggctctctgcaacctctgtctcccaggtttaaccaattttcttgcctcagcctcctgagtagctgggactacaggcatgagcaaccatgcctgggtaatttttttttttgcatttttagtagagatggggtttcaccatgttagtcaggctggtctcaaactcctgacctcaaatgatccacctgcctcggccacccagagtgctgggattacaggtgtgagccaccgcacctggccaaatacctaatattttaaaaggcaaaatattctacataaattcaaactctgttaatgggtattgtgccagaaataggctatcagtgtaaatatgagctactaaatgcttattcatttgttcaccagcacatatcaaggaaacattagtcagccagctgaattatgaaaattctctccctataattaaattatcatagtactaattaaaacaagtgtatactttttatacctgcatgtccttaaacaaatgtccacttctatctagtcaaacactaaatgaatgtattgtaaacattgcatgaattctaaatcccaaagaccaatgcacagaacaatttcattttgcttttcaagatagcaaaaagactgagaataagtctcgctcacccatatgaatttcctatgcaggcattattcccgggttatctagagttgaattgttaatgctatttaattttaatagccttctcaattttaaatcctacttgcagaatgtgtactccatttatgctatttcatgcttgacttgtctacatatctggggaaaatttttattttgatttgggttcagaatcaaaaaaaaaaaattcgcaacttggaaacgactaatatctgaaagcacgaccaaataaatcttctctcattcacagcacccaggaaagccaagattggcatgaatgaatatgctttccaagccctggcttttcttgggatcaagaagattttgccttgtatttttgcatgtacagaaataagaacaaaaagcacaaatatatattcgatttttgcactaagttttgggctgcttatacaacttagaaatatttctctatgtatccatctttctattttcaggtagagtccaatgccatgaaaggagctacgctgagtggaagaacatcaactatgtttttaatggtcattaaatgaagtctcaaaagtgaagatatccaatcaagtccaatccctggaacaatgtagaaaagatggacctaagaaaccaaaattgaaatgtctttttcatggatttagtgcagattccctttaagaaattgataaatttcactgtggactggttgctaggatacccctcaaaatctattaaagtaagctctttcctttaaaggactgggcagggtttccattatttcaaaatgactttgaaaatcatgctgggtgttccatctaagtgaatgaaacaggtaaatgaatggcccttaagaaaaataaatgaccatgaaggatctaaaaaataattaggctgtctcataatgatacatttaaaagttagctttgtcaaggagattcagattttcaaacctgaaaggaagaaataaaaatcaaatgtgaaatggaaaatgtgaagttccttgggggtagttaaaggcctactgttgtagaaagcaagggacagagtttacatttagagtgggcatgttgtttgacacttatcatcttaaatgtcatttttctctggaacaaaaagtagcatgggtacttaaaatgtttcacattttgaatttctgtcaattagtgaaaacttggtaagcgctcttacaggaatgttcatatccagttctgttacaaggaaggcaggctggggtaaaaaagatgaatgagttctagaaaggaaactagaagcctgactcctgaactgaggacacagagtgaatgttctttgatattttgatattcacatctctggaaactcattacatatggctgttttccttatctcttttcgtcaactatggataaaaaattctgaaatcaagagtgatcctgtatcaccaaaaatgggaactttgatgtcaatactacctaaagtgatctacaaatttaatgcaatccctatcaaaatcccaatgtttttgcttaagcagaaaaaaatccatcctaagactcatgtggaatctcaagggacccagaatagccaaaacaatcttaaaaagaacaacttcagaggtttcacacttcccagtatcaaaatgtattacaaagatatagtaatcaaaatagtgtgatactggcataaagggacatatagaccaatggaacagaatagaaagcctagaaataaattatccatatgtggtcaaatgattttcaacaaggctgccaagaccagtaaatggggaaaggacagtcttttcaacaaatggtgttgggaaaaccagatatccccatgcgaaagaataaagttggacccgtaggtaacaccatatacaaaaattaactcaaaatggattaaaaacttaaactgaagagctaaaactataaaactcttagaagacaacatcggagaaaagcttcatgacactggatttggccatgatttcttgcacctgacaccaaaagcacaggcaacaaaagtacaaatagataaattggactacataaaaattaatcattgtacatcaaaagacacaataaacggaatgaaatggcaacggatggaaaaaaatatttgcaaatcatatatctggtaagggtttaatatccagaatagataagagctcctacaacttaacaattaaaaaaaaaccaaacaacatgatttaaaaacggacaaaggacttcaatacagatttctccaaagaagacatacaaatggacaataagcacatacaaatatgctcagcactactaaacaccagggaaatgcaaattaaaaccatgagataccatctcataccgactaggatggctactatcaaggggaaaacaacaacaacaaccaaaagcaaacaggaggtgcagcacgtgggagttgctaccggagcagaatccaggttggagttggaaccctggagatgccgaaggaaacccgtcttccctaccgccccctaacgcaccggcctgcttggaacgcagttggaggctgcgcggtaccagtcccatgggggcttctgctccgggtcctccagtctcagtggtcgctgctgagccggctccctctgacttttttttttagacggagtctcgctctgtcgtccatgctgcagtgcagtggcgcgatctcggctcactgcaagctccgcctccggggttcacgccattctcctgcctcagcctcccgagtagctgggactacaggcgcctgccaccacctggctaattttttgtgtgtgtttttaatagagacggggtttcaccgtgttagccaggatggtgtcgacctcctgaccttgtgatccgcccgtctcggcctcccaaagtgctgggattataggcgtgagccaccgcgcccggtcccctctgcctttttaaggacccctgtgccacccccaaagaaggcttctgctctgctggagcccagatggaggctggagtggctgacctcacttgtggggaggagagaggtatcacagcggcttctgattcaagtgctggtgaattgtgggaggtggatgagaacgagccacttaccgtcagcaagttctgcaagtatgagcatggagacactgtgtctaccctcagtgttctcggctgtcagcggcagcaaagacttcagcatcaaggattgggaccttgctctgcaggtggcactgaattcataccgatctcatgctgggcaggtcacctgtgctgctgcctctccccgcaaggactctgtgtttctttcctgcagtgagaacagtagaattttattctgggatactctctgaccaagccgacgtcacaggtgggctgcagtgcctctggctgccttcccacctcactggcttggcatcctcagcaaagtgaagtcttcatctttgtgatgggaatgggacagtctcccttgtggacaccaagagagggagaggtgcccttggctcagctgtacaagaccaatgtgtcattgggctggtgttttcctcacaccgtgttcccttcccggcctcttacagcgaagatggctcactggctgtgctggactccagcctttctgaggtgtttagaagccgaggccactgtgaccttgcgagagatgctgcttgatcccccctcaatcactttctgcttaccacaatgggctgggaccatcaggtcgtctgccacaagtgcccacagaacctctcccagcccctggacctgaaagcgttgctgagtagattggacttaagacaaacagcaagtcccccatgagagtccacttctttgcccctgttccctcagcttgtgagataacacaggagccttctgtagtatgttgaaacattagatctgtgccattaattggcatcgtctcgcagcctgaaggaggctggatgctgggatcctgtagtcacaggaaagaaaagctttcttaaaaatgggcatgcaggttcgtcttgagtgtgtgtgtgtaggttttggtagggaggtgggacggtgggggagggatttaaaaaaaatctatcccacatctcccctgaacaccatctctccctcactccccaaaaaagttgacaaaagggttttattcttcccatgtagctgtctgaggaattgaccatatctgggtggggtatggaatgtgggcatccctaggttcctggaagcagctcttatgctactcatagagatgggactgattttattttttatagcgcttaattcaccgttatgggaaatgcttccaatcacaaaaattcagcccagctcgttttgaggaagaggcaggacatgttatagttttatacaactcatttccattaaactgaatcagaagtcctttttctggatgaattaaaaatgtggcctgtgcctgtgtaatgtccactcctttctgccaactcccttccctctgctccctgctggtgttgtgtatatgaaagaggagtgtttttctgtcatagatgccctagaggaaattttgtggatgttggagagcttaaaggcatttcaattgttagaaaactgacacagactgttacagaggaatctttgccacttttcccacccaaaaccagcctggggcctgacctcttctgctctcagcccctttctctgcatatagaaagtctaaatgcagtatgtgtagacttttaaagttttaaaattcagcctcaggaagaaaatcagaaatactggctggtgaaataaacagtttaggcatcttgtaagcctgccttttttgaaaaacaacaaaacaaagtaagtgttggtgaggatgtggaaaaattggaacccttgtgcactgttgatgggaatcaaaaatggtgcagtcattatggaaaacaatatgacaattcctcaaaaaatgaaaaatacaattaccatgtgatccggcaattcaatttctggatacacatccaaaaaaatgaaagtaagatctcaaagagatatttgtatacccatgtttagagcagcattattcacaacggtcaaaaggtggcagctccccgagtgtccattgacacatgagtggatgaataaaaaggtggtatatacataaaatggaatattattcagccttaaaaggaaaggaaattctgacatgggctacaacatggatgaaccttgaggacaccatgctgagtgaaataggctagctgtaaaaagataaatgcaattccactcatatgaggaacctagagtaatcaaattcataaagacagaaagtaaacaggtggtttcctggagctgcgaggaaaggggaacgggggtttattgtttaattggtgcagagtttcagttttgcagatgaaaagcattctcaggattgattgcacaacaatgcaaatgtacacagcactactgatgtgtataattaaaaatggttatgataaattctatgtgtatttcaccacaatttaaaaaaaaatacatgaaaattctttggaaagtataagatattacagacaagaggcctcaattattgaaaaaaaagatgaaacactgtcctgaatttcccaaggggaacaaaatcttgagcatgtcacctttgaaagcatcatcctgatccatgtgtactaaaccaagtctagtgtgatataaagttccataggctgcatgtggcattatgtgctacccttcaaaattgatttcaatccaagaaagagaacaaatctcgattcccaagtctttccacaacttgcttgcttttcaaacataaatcatacatattaaatctaaccattgtctataaaaagccaaccacacatttaaaatgtgttactggtaatagagcagcttgaggaggaagaggatgagggaactgaaggcaaggggagggaggtctgtggagagggtggggtggaacctgccaggctctgggaagatcaaggacattgacaaaaaagaacagatttatcatcacagaaaagatgagggtaaaaaaacaacaaacaaacaaaacaggttacaggacaggacataagggcagaccaaccgtttaaggaaaataagtctcattagagggttagaagcattaaaaaacttttttcactttgtcctctgaggagaatatttctgaaatttctgcttatggttatataaaatcgggctgaggattttttaaaacgtaaagttggtagcagactttggatattttcatctatatttgtttttctgcctttaataaaatagtgtgtatgtttcatttcagaagctatcaaagaccacattttgattggtccacacaatcaaaccagaagaatgttccagtttattgaatttgtctccttatttaagaaaaagaaaattaagccaggagaagttagcgctccatccaccagctgggtctttgatgaagggaagtgaaatgaggattctgcacaggtgggcggtagctggtggagtgagcgccctgcaggtgcaagtcatgacaacaaatggggagggatgctgtgaagacattgccccattgtgttaggagaattcccagacaccccattccactcctccagctctctccaggatggaagaatggggaactatgaggcgtatgcaccatccaggaagaatcctaagtcacatttaccctgaaaagcatgcttctgtccatgaatgtcttccaccctgtggctggggcttgggggcgggtagggaacagtgtggctggtgatatttatgcttttcttcatttaccaaatatcttgtaaatggaactctttcttttttataagtcagtgttaatgagtgtagacctcagagatttaaaatgaactatctgcaaatctgtgacattacactagaataaatgttttattaccccctcaaatccaagtctctcttaaaagatgttgaacagaaagtacttaaaggaatatcttacatttttcatccatagttcaagttaaatgatagggtaatactaacacattagctgtcctttatacatattaatcaataatgcagttttattatcaataattgatttaagtctcagtagtggacaattttaaaacagtctaaatgtgaaagttcagcattctaatcgttcacagacaagcaagttagtgtgaatatatgacactatgtaaatgacaatatatacatccaagtttaagtttacagtccaatataaggttacaattatgtcaagtcttagaagaatttttttcatagatacggacttctaacctatgtatatcactcttctgttactatacttgataaaatacattttgctagctagaatagacttatacttagaaagttccatttacagttacacaatttaataaagtttgattaaatgaactggcaaaatctgtaatgttacaaagtaataaaatgtaaaactaaaactatggcacatctgaaaatcaagaatgacttgtttggcccacattacaattcctgtatactagaataataatatatgttatgtcataatttttcataaatgatttttcaaaattcagcaataattttaaataaatgtgtgcatatatatacgttttgcatatagttacacaggtttcccaactgaaataactaagagaaataaaaacagagaaaaacctgcctctgtgctggaaggagggaagggtgacctgtcaataagtgtttgttgaatgagtgaatgaatcatgcaaaattctaatatcttattaaaataggagataacctgccatagctaggacccagaaataaagaaaacagagttactttcattgtatctggggatcatcccttagctatttctctcagtattttgaacctatgttaataatggatatcaaatttttcaaacaccagcagaggacaaggaagagctaacattctgaccccagtgaaagtggactctggtactttcatttagtcacaggctcgctcagggagtcttgtttcttattcctcactaatagtcccagtcatacaagcacttgagattattttggctccatcctacttccctgtagctactatggcctcccactctctcatggacattcatcgtattttgctcttgcaacattccctctcttggccacactccaatgcaaatgatttactgtaatatgtctccaccttcacaccttgtgagaatgaaatgaaaaatcctacaattaattcctaaggaaaacagtaccttctaatgccaccaaaggtattggaagcaattattattaattaataatataattattattaattgcaattgtcgttgcaaacagcttccaagagggtggtagacagccaagactttttattcaaatagctgttttcattcataaagcaatctactaaatgataatgtcatgctttttggcaacatccgtatttatgggttctccttttaagaattttctcttacatttggcatgctcagtacaggacaatacttcttaggaagtttgatggatatttttcttttgtacttttttaatcaacagaaactacactgattttgatttgcttaaacaaaaattttttttcatattaacagtcattttaccatagtgttagaagacaccatggtggaggtacttgcagtgagataacatcctgcatattaatccttgtgtttttctctcctccacttcctgactcttcccttcatcagctggaggcaatcacgttgcctgggagagaattaagattgttaaagcaggaatttaaggagaaaggaactattttaatattatttttgaagtagaaactagggttttaagattcaaaaagagaagctccaaggagaccagagcagagagtttataacctcttcaaaaagaaagagtcagccaagagtcagctccaccccttggaaacatcaagaagcccagccaacacctacagaccatcccttgccattcctgtgagctcatcatcatgcccctggcagaaaagctacaagtttcttcttgtgactttcctatgaatgccttcctcgcgttgttgcctatacatggaccgttgctcattcaacaaaagccaacttctcaccattccttcgccttctctcctgccctgagactttgatgagctcccatctgaattgccatggatatgtacccacttctggaggcactcaaaagcaagtcccctggatctgttaaaaaacaatgtggctgcctataaaatataaaagtcaaaacaacagtagcttaaggaagatagaagtttatttctctatgatgtaattgatatctaaagatgagcagtctagacttggaatagcagcactgtattcataatgacctcaggctgcttctgtatccctgctacattatcctaatgctggcttccattttcaggatcacctcttgtcctaagatggtgggacaagctgtcacatttatatgctccagctatcacatttgctttcctgacaggagaaagggtgaatgcccacatctcccagctgagtcaacaactttaaacaaactttctgaaagtcccacacaacatttctgattaaatctcactggctaggacttgccttcatagccacacataactgaataaaagtctgagaaatgtagcattttatgtggatgcatcccctacaccttccccactgacccctgccaaaaaataaaaataaaataaaataaagtgaaagaggagaatgcttattggaaattaactcaccctaccatatgcccctttcctaaaaaaaaaaaaaaaaaaaaaaaaacaaaaacagagctgggtctttgaagagagttgatgtggaattaattcacaggtacatatctgggggaggactgggtagtggggaaaaataatccttgtttcatgagaaatatatagataaataaccaagtaattaaggttccattaagatttttaaatggcaattaacaaagccaaatatttcaagtgtgttatatataatacaattatctatgttacatataaagatgaagatgattatataaaatataaattatattaaaaataaacatacagtaaattatgcataatatatagatatgccatccaaggcatttatgttattttctccttgaatgatcaacatgacattcaccagaaactggatatgtctagagacatcttgatttgcacctaaaacatgaagagccgctttaccaaaggccttgggagagacaggtgtcctagagtctagaactaattcagcagctcaggatagaaaggagagcaaagaacctgtgacaccataaaaaacttcagcagcagtaaccaaccatgatggcaattaacataaccagcaaaataatagctaatattcgtagagtgtttactatttggtaggccctgcaatgactttactctttaataggcacaacaactcgatgagactagaactattatcactcgttttcaccagtgagaaaactgaggaacagaaaaatgcagtcactgaagtcacttgtagacaagcgcattgcacaattaatcagcgtcagagccaagaataaaaccagggttttattctgctctgaactataccttctcctcttccagaagtgcagacatctgatcagaagaaaagatcacatgatatcacagaatcatcaggatggtgctgaagatgaacaaactgaaatgtctgaaagtttttaagaaattcataggctgtcttttaagtatgatgttagagacgccaaccaaatattgctcttctcaggggtgggtcatttcaatttcattttcagaaatttccagttgatacttatcaccacaaatgaaagctataaagaaagactacttgaaatgcatgtcagtccttttctttaataaatttggtttatggtgaagccacaagacaaaatatgtttatccccaggaggtataaacaactcagtgcaggttataggaatctcagttttgtatccaaacaggtgaaacatttttaccactgaccttcagaccatcctcacttatctgaatttctgaatttcagacagaaattaagcaaggatgtaatgcatactctatttacttatattatttatatatttcagagctaaattttttagaaatgcaaacactatctttgtttgtgagacagggtctcactctgttgttgactgcactggagtgcagtggttccatcagggctcactgaagcctcgacctcccaggctccagtgatcctcccacctcagcctctcaagtagctgggactacaggcttgtgctaacatgcttagctaattttttaaaaaataaattgtagagactgggtctcactatgttgcccagtctggtcttgaactcctggggccaagcaatcctcctgccttggtctcccaaattgtggggattacaggcgcaagccatcatgcccagctgacactatcttttaaccataagctacttaaaaaaaagagcagtagagggtacagtttgttcaaagaagaaaattttactttttgaaaaattgaacagtacaaatgctgtgagattgtaacccgcactttctaaattcagcttaatcacatcatagtatcttccaaatctatgagtttgctgttaaatattaattacattttaaattcataaatgtacaaattaaccttgttaaaattacttctgaaatcccattgtttaataattcattcaataatatgcttttgttacaaaagtttaaaaattcaaatcagatcactgaaggtgattcttccaatttcctaattattaaaatttctgacttcagttatctaacaaaacaataccagccaacacattggtgataaaatagacctgttattttgcagcttacattctattgggtgaaacaaacaataaaaaataataatcgagaaaaatagagcagaaataggcgatagctagggtgtactatgtgatttagataggagggtcacaattttaaatcaagcggaaagcacacccattccccccattctaaggcagagtagtccaataaacttcagtttttacaaaattaaactataatttatgactcttaggtatcaatatttctatttgatatgttaattagctaacaaattattctcaaggaaagaaagacagaaattctccatgagaattctgattttcagctttgtaaattctcctaaagaagtttcaggagaaacttcctctgaccaagttaagaaagaagagccgtatttaatcaaagtatctatctactgctgtgttaataagtttcttaaccaagaataaatttcaaattacatggagaatcgctggaacccaggaagcagagggtacagtgagtcacgattgtgccactgcattccagcctgggcaacagagcaagactctgtctcaaaaaaaaaaaaaaaaaaaaaaaaatatatatatatatatatatatatacacacacacacacatatgcttttttctatgtatagaaacccttctttggcatctatgaagatgctcatattttctaccttatctaaatcaatatagctaattatcaatatagctaattaacttaattagctatattaatagtaaaccatccttgcattcttagaataatctccacttgggtatgtggcttgattcttttattaaactttcctaataatatttgcatccataagtgagatgaaatcacaatttatttgttctttattggatttaggtgtctttgttatagtaacatttaaaaacacacaaaagatttccttgtttatcaaggtcctaggaaaaatttcaagtgcatttaaattatgttaggattcaattctgaagttcttcaggtttagtgatgtatgtgttagtggtggtagaggtggctgtctttgacaacttcatttttttatggcaattaatttgtttatgttttctgtatccttttgaaatagccataggctatttttttctttaatcattttgtttggcaaatggcatggaattggacagagctcttttagttattacttccctcctccctttgtttctattatttatatttctgtttaattggcttatctagttttatctatttttgtaccaaaaaaatcagtatttattatttttccttattaacttaccaattccttttttcaaaagaaaaatgtttaacacattttcattattttttttttttgcaattggttgaaaaaatgtaaagtgaggaaatagaaataagtttatcaaaaactctaagagtttggctgtaagagtagagaaatgggtgtattcctagagggaaacaataggtttagtgttttttttttctaagaagcagtattgcaacctatttgttgatgacactcatttagggcagagggaagaaattcatggtacaggagagaaagagtttaatcatgggagcaaggtccttgagtgggcaagagtgtatggcaacaactgcacagagggaattgttgtgaggcagattgctcatcctctgtaacagcaggcagaaggcattaactatggaaatgtgtatttggtcattattgatggcccacttgagatatgtggttatagaccaagaatgagtccagtcagtggagctgtttttctttggtaacattttatagcttgactacactcaagctgtacggaatgggcagtggaaaagatttgagcttaaccctggttggatgtctgtcaggtaagtaaaagggcacatgcatgaaattctgcatctttcatagggttcacaaacacattatggtatatgaattaatgcaacagaggattcaagaacactgtaatacagggcagcatggagcagggaaagagatttttttttaatgcttttcagaatttgatacgtatacctaacttgaacacaatagttgaagctttgccagacaggtcggtaggggctttctcatctccttgtactagtaatttcttcttggcctttagagatggaacagcatccacctctgatttttcttgttagaaggcatatcagaatctctcaggaatgcaagtgtagtgttcttttttctttatttaagtttacgaaatacatgcttatagaaaattaaaacattatagaaatatgtaaagccacccatgaaagttcttccataattctgcttcctaacaaagccactgttagtaatgtggtgttacttatattttagagcatcaagttgtccacaaaaatgcttgcacaacttttttttttacccaagtttagaaatcttgccctaataatccagacattcctcactctcttaacgaatacttagaaacaaattgcataaaggtaccatctattaaaccagtcccttactgacagggcatttgggctagttttaagtattaaagaacaaaggtgcaatgactttgcttgtgtacacttgtcagatcattcccattaggcagtttcctaggaatgaacttagtaggccaaaaggttcaaagtttcaataaatcccagaaaactacattcctaaaggctgtgacaattatactcccacctatggcatacaagatgggtaatgtaattggaagtgcttgttcaaaatcatggtgcaattttttaatttggaaaatttaaaaaattgactgttcttataactgtgttttctaattatagaaggtgaagtctgacaaatcttgattaatggggaatcaggatcccagggcaggatttataaaacttgtatttaccaaaaagaggcatcagtattagaaactttaaaacttctctttaaaatctccgcaagattgcagcccttgctacagctttaaatagctgcactggtatctccagttattttccccaagtttcaataccagtattggtatcctactagttgaggaataaaatccatacttatatgagctttccccagaacaagccagctttagtcccattattcgacagtagcagaacattctttgtcccagaacacaccgcacactttcttgtgcctggtttcatcactttatgcctcatctcttttccttctttgtcttccttcacttcaaggtaatctccaatgccacttactctatgaagtcttccacaatccttcctgagaaaaataaatggtcttatcccttctgttcccccagcatttcacctgcacctctgttacagaatttctatactaagctaccaaactggaagtcttagaggatagacacatcttacttgtctatttcctgaacagtatctagtgcagaactttgtagaacatacactcaaaaactgtttttggaataaacatacataaattaagacttcaaatcttttaatctcaaattattagtcacagatgttattttttaaaggactaaaaaaaaactactgctccttcaaatgtcctaattatcggtttcatacattttttttaaaaaagggggttttctaataagactgtcaaaatattacatctagaatagttatgttcaataaacctgcatttacttgatatctgcatcttcctagtatcacaaattgttttagaaataaaaacacaggggtaggggacaggggacagtttattgtaaaatatgaagcagcaatgattgaagcaagtgaatttctcctttatattcccagccagagcacaaaatgactggatatcctcatgaacgccaagcttttttttttttaattaaaaagaaaaaaaaagagagagaaaaaattccacattcattaaaatctctttctcttgataatttctggtttccagctgactggatgagtttcttctgtctaaaaatagaaaagtgagttaaaataaagtattattagtttgcttcatgtctaataggcttcctttctaacaaaaataaggtatctaacattattcattggctttatacacttagttctttgacagttttaggaagagttgataaacttctggcattatccaagtctaataacagatggatggattcattatgtttagtttgtagttttccatctaaaataacatttctacttggatattctactaacaccaaagcttatgattctcgaattaatttacatagcaatctatttatttgctgttattcttggtgcaacatttcccagcaactataacaaaggaagttgggataaaattaaagccatccatggattcactggcatcagtgaaacaatatagaaatatataaatggacactattcaagaagacagatatcttaaatactataaagattatttttccttctgataattaaatgagaatatgctgccaaattggtatagctgttttacttaacgaatgtgaaacacagaacttacggctgtgtcatcctctctgtatactttaatggttttatcagcttcagctgttagtaatcgactttcagactgatcaaaagcacaagcaaatattcctgattcactgtccaaagacccaggttgcacagctgcgtgaactctctgaaaattgtagccagttctccagtcccaaagatgcatggtgccattgtcagcttaaagggaaaaatctagttacacctggtatcccctcagcagtacagcttgacaaacatttatgaagcatcattagcccaagcatgggaatactacggttataaaaatacataagacacaggcactccaccttctcttaatattggtttgtctactttcatttgggctgggttcagaacttatagatcttaaaaagcacctgaaaatctgacatccaattccagaataataaacaaaattttaagcaattcccagcataaatccctgagattcattagatgggaactcaaagaggactaagctatgaaatatactacatgtaatatgaatatgcatgaacacacataataacatgcaaatatgccctaaccaggcaagtgctgctataatacttaagtgtgacagcttagaagcattacaaatgtttattcatcattaaaagaaaaaataacagactaaacatatttattataaaaatcttattttacctccagatacaagcactccatcagaatttaccgtcaatgtgttaataatagcattatgaccggaaagattttgaatgaaacttccatcagggaatttccactgctttatgttatctggagaaccagatgcaaatgtgtaactgaaataatattaaaaagaattaacgacaaagtaaaccaagttaaataaagtggtgggttttaaaaagtttatttcagttatattttgcagtgtgtactcaatgatttatatattcagcaaaatagtcgtatcaaaatgtaaaaatattaagacatttgttcaaggttaaatcagaccttcacatttttaacagtatattttaagtcctagattaatgttttgttctcctttcatttccttaatgctctgcactaagccagagcaataaatgtgcagaagccctatttcacatgaagggcaatgtgttatgcaactcttttggagggagggagagcaagacaggacaggaagaaagagagaaaaggaatagagggcaagaggaagagagagaacaggagggaggagaggcgaaatgggagtgagaaagataagcaaaggaaggaagaagagagggggaaaagggtatggagagtagaagacagagaagaggaaaggaaggagaggaagaatccagaaaagtgtcagagtgatctgatacaccaaacaatagttgtgatattatgctccacctttttggatactctgactgtaatgttcacggttcttattatttctgtttctacatatattaacttcctccttaagaattaaactattcaatgaatgtctcagtgtccaaaatcatttatgtccaaaacattaagcctagccactaatatcttttattttgacatgcagcatttaatcatgatttacactgtctcatttgacattatttatttgttatcaagtagaaggctttcctcatgttttatagggcatgaagcaaaatagtgcatgaggaaaataaaagaaacacacgttcctatgcggcacaggcctagaaatgacagcagctaaatgactgccaaaagcagtgctaacaccactagcatttcagcattatcttaagaactgaagaaaaacaagaagctaattaggaaaatacacttactgtcttggatgtaaaaccacagccctaactgattttttgtgatttgttaatgtcactcttgtttttccagccaccagatcccataatcgaattgtagtatcatggcttcctgtaatggaaacacatatatccctcaaaacatagaccaggaaaaataatgcaaaagttaaataaaatacaaagcattcttccaaaacacatatgttctaaatgaaagtcatatcacacgcaaattagtcttggctaatttcttcatagttccaaatttttaggttgattttaattctttaaaaaaatgcaatacaacaattgattcactgtcaattgaacagctaaaacaaatgcaaataacaaataaatatataattgtataccctagtgaaaaggaaaaaacttcaatgatttttttaagttaataaaatacatcaggcaaaggaattattttctagtattaaagatccattgttactaactttatttagagcaaagtaagattcaaatcagttctaaagattactagtctcaagatgttttgtcttctaacttcaatttcttagaaaaataattttgacactataaaataataattgttcataacacagtattctagtcagacattacaggatactatgtatggcatactctatgatatgtaaaaagcatgaggtaaaaacagtggaatgaaatttcatttgaatacatttcaattgtccatgattaaaatatgacacagaaacactgtaaacacaatacagagcaagagtcatcatgaatattaaaagtatatgtataataacatggattctgacatgaatattctgtaaacttgaaaagtatcgatcatacctgtaataatttgtggttctgcagcctgacatctcactgtagcaactgcatttgtatgtccagataatgtgtgtacactggctttagttctcacatcccaaatctataaaaacacaatagacatattaggaaagagaataggtattcattatctcaagaagataactggatcaattcaaggctgaaaatttactacataactagtgcctgaatataataaagaaaatgcttaagtgaaagataatgatttacaaactggaggacgaatataaataggagacaacttgcaagaattctaaaaagctaaaagatcagggtactgaaaatctaagaatgagtatgatgggactactttttaagactactgaatgaaagaactaatggacaatagttgttacagaatggaacgtgagaatatcacatttcaggggcagggcactaataacactaacatggtgaggccatacaactgaagactaaggtggaaaaaaatgcaagttaagaaacttagggactaggatattgatgactcaagacagctatctttaattctctatcaatcaattgaagacactgaaaccgaaagtgcaccctacaagatgcaatatatttacagataaatacacaactctatcccatttacccgtgcagttgaatctcgactacaggttaccaacacatcgattgtcgggtgcaaatccaaaccatacactgcacttaaatgtccatgataatgccgtataacctaaagacaaagcaggaaagttaaaacttctagaattagaaagataaatagtagttcacaatgttttaaatccttaactccaaacttaccttattgtattcgagatcccagcatttcacttgtttgtcttctccacaagagaacagatatgggctccttgtgcttactatcacgccccgcacagtactaatatgcccagtcaatgacagttttaatttgccactagccaagtcccagatctgcaatcaaagaatatttatttttttctttcactggttactgcaaaacaaaattttagaaacctgattattaaaactgagctttcaaagacaaaaggaaaaagataacaaatacgtaaaaataaaaaattttgcaaaatgactcccctccaaataaaagcaagaaaaaaactggcatgctcaaactggaaaaatatttgcaattagatgacaaaaggttaaccttcttgttatataaatgatatctttgataataacagtaagaaaagtatggtattaaattaactgaggctggcaacaacttaaagaaatcctaaaagcagcaaatacagatatgaaaaagttcacactcattagaaatttcatacaaagttttttaaaaagattaagtatccatttttgcttaccatattagatatttgtaaaggaatgtacaaccaatgtgctgaaaaggatcctctcatacactgcaagtatcgattcacccatttggaaagtaatttgtactttgggtatcagcttcaaaaatatttgacccatttattccatttatggaactctaccataacaaaataatttaaaatacagaaaaagtcttatatacaaaacttaacagcattacttgtaatggtgaaaatcagactaaaaactctactgtccagtaataggaaaacagattacagactatctaaatgatataatattatgcaaccactttaaaagatggtaaatttttcacaggaatatgcctttgatacaacgttaagtgaaaaaagcaagatacaaaattacatactaagaatgattttttaaaagatacacacacaggaaaagagcttagaagtgaaggtattgatacttacagaaataaatactaaaacgaaacttatccaaatatctaacaatggtaggattatatacaggtctatgtactttcctaattctctatattttccacattttctatgaatgagcatgctcttaattttgtaaccagttggagagaacaatgtaagtataaaggaattagtggtaggtattcagtaggtaaagaaaaagtggtttaaatagcacttttcaaacagatatttatttagaacacttattagtataaatgataaattttactccttattcaggtctaaaataacagaggaactgcaatagcaattcctgccacaggaaataataactgattaaacttacatgacaaacacaaagtcatgtttattttttcttccttcattattacctttatagttctgtcagcagatccagtaacaaaccactgatttccaggttccacagcaatacatcgaacccagccaagatgcccactgataacctgtataaaacaaagtagaatgggcaggccaacgtagaagttaaaatgtatttaagtttaactgcagcccgagtttgaattgccctcccatcttcaaatcataaaagataatgactattacattttacaataatatgaaattatcttcagtgagttaatagttaacacaaattgtggctcatctatataatgtaaactactcagtaataaaaaggaatacattattaatacttgcaacaacttcaatgactcacaaagtattaagctgtgtgaaggaagccagtctcaaaaagtacatattgtatgattccatttatatgacatagtcaaaaagacacagctaaaccaacctaagtgtccatcatgaggtgaatggataaataaaatgtggtacatacacacaatggaatactattcagccataaaaaagaatgaaattctgttatttgcaacaacatggatggaactggaagatactatgttaagtgaaataagccaggcacagaaaaacaaatattgcgtgctctctctcatatacgggagctaaaaaataaatgatcttcagagttgaatgatggctaccagaggttgggaagaatagtggggaggcagaagataaagaagaggtggatcacgggtacaaaaatagataaagggagtaagatttagtgtttggtagcactagtttggttagctagtttggtagcactagtttggctagttagcttggtagcacaatagagtgactacagttaagagtaatttattgtatatttcaaaataactagaagagtaaaattggaatgttcctaatacaaagaaataatatcccaattaccgtgatttgatcattacacactgtatgtttttctttgttttttgttttgagatagggtgtcactctgtcgcccaggctggagtgcagtggcgtgatcttggctcactgcaacctccgcctcctgagcccaagtgatcctcccacttcagcctctggagtagctgggactacaggtgtgctccactacacatagccaatttttgtatttttttgtagaggcggggttttgttgtgttgcccaggctggtactgaactcctaggctcaagagatgcgcttgcctaggcctcccaaagcactgggattataggcatgagccaccatgcctggcctacacactgtatgcttgtatcaaatttgatatgtagcccataaatatgcacatctattatgttagccataaaaattaaaaataaattagaactgaaattattgaaaaaaaataagacaactatagtgatagaaaacagatcagtgattgtcagaggtgaaggaaagtgtaactacaaacgaatagcacaagggtgttttttgaggtggtgtaacatctatatcctaattgtggtagtggttacccaaatcaatacatctattacaattcattagagctgtatgtcaaacaaaaaggctcttactgtacaatcatttgaaaaatgaaatttttaagatacatattaaattatgtgtagctgtacatttcctactatgtacattttcttttttaaaattttctgtttttaatttttgtgggtacacagtagaaatgtatttatggagtacatgagatattttggtataggcaagcaatgcaaaataaacagtatggaacacttcacgaatctgtgttatccttgtggaagggccatgctcatcttctccgtaccattccaattttagtgtatgtgctgctgaagttagcatgcatgtccattttcttttagatgatacactctgaatcattttcatttattgtagttgaaagagtaactggtaggcccaaataaatttctttatatggtgtttttccccttcaccttcaaactaaatactttgaacactttttctacatttatttagtctgccatccatatttagtagctttatcttgacatttcatactattttatataaaagtataacttttgcttaaggaagtcaccttcccaagagatcttttaagatactccctacgactcttctcaatccacctcagatcgctctaccagcttttcatattcactctttttcctccttattctattcttcagtgcttgtcaactacaaagcaatcatggttcacataataaaataaatgcagagtcactcaccctgtagagtttccacggtgggtgccactggggttttggcattgtaggggcttttttagccatcagtgcagagttcttggtattgccagtctccatgacaatctagacatagaagagacattattattattaaagacatcatacctaaggcttcatgatatcaattcagaaatggaaatggaaagagggaacttacaaaagaatttttccataaatgaagaaatacaattttctgtatgttaacttaaaaaagcaattataaaatcacagacaggcagagcattagacttaagagcacacatcactgtgtacgggttcaaaacccagcttggccaattactagctgtttgacattaggtaacaatcatgtaacctctatgtggctcacctgtaaaatgggaagaatagtgcctatttcatagggttactacaaagatttaataagtagtaaatgctccatgtaagctcccaatattaaagtcattttaagtgtattagtgccactgtctttcattgtcatattttaacattattggtttaatatagcaaagactgacagttccttctatttatcttctaatacaatatttaaatactattttaacaggtatactgcctgatataccatctgttgttagcagtcatctagtcatccaaaacataaataagcccataaagttcctgccctcaagaagcttaaattataccctcataaggagggtagagagcctggacagaagacgtgctctgaatggaataaaggaggaaaggagatgtggcagttacacattcattcacttcataaagtcaaatcaattgcataatgagctgagaagcaaaaccagcacttatttcaagtggcagcatattttattatgctgcagataaatcaataaaataactatagaaaattcaacaactatttctaccatactaataccagttgccatttacttacaaacagataaacttatttctaaatgctcatttataagactagttgtatagcccatgaatagtacaacactaacagcactcaagataactgtacacaccaacttaaaatttaataaaaaaaaaaagactttcatattcaatacatactaacacaagtttcagaaaaactctccttgcatttttaatagtgggcaataaataccaacatcacattatctttatcaaaatatatattacacacaatgtacaagtagacaaataacagaattaaattccaaaaaatacgttaatttactaccaacttgagttttagggctatgaaatatgaatgactagctcaggctgctatttatcttaataattccaaagaagagggaaatatggcaacatgttccaaaagttagaaacctgctatttgatgcagaaaaacttactgaattcatcgctgtaggctgtggacggtcagaagccccaggatgtcggtattcacttccactaggggcagtacgatttgcatcagccctggggcaaaagaaataatattttcaaagtaattaatgcctccagtcatgtattctgcaaaactaaccctttattttaaattgttataaagtcctgataaaggaaaatgtcatataatagttataaagaaattttaaaaagaaaaaatgtgaacagtgaaatatgcttttaagatctttgtaattataatatttcatacttggtctgcaaaggtaatgccaccgctaaggactgtgcagctgattcacttggcattctctggatcttagtatctgctgtcaaagcaacccctattaaaatgaaaaatcaacttcttttagtagctgtgtattattcatttacatgcacttaaaataaaatgatgaaggaaaacatacaccaaatgtttattatctccaggcagtgatattatacaaatttgattaagttttgctcatctttgtttttaatttctacaataaatactgcttaataacacgtaactcaaatttgatttgatcacagcccacatggtattaaagcagcccagaatagtaaagttaatttccattatatttgggtattagtttcaagtcagtattaagcagttcctcaaatactaacagaatgtttccaagagtggatgtaacttactaaaactagaaacacccaatttccctgtactttctttacatactaagccttttgtcctctaccctgttacactggccactccatctgtggaccaatgccttaatacagacagaggacatgtttctcagatactgcttctaacatttccatcatttttacaagcttagtgatatttacatgtctgcctaaaccaccagataataaataactaggcctgcaacagttttactgtctttgaattcctagcacattgcctgaaaaattatacgtacttaagaatgtttgctgaatgaaggcatatgagtattcattattacctacaaagctatgcatggatgcttggctactgagcttatcttgcattttataggcaacaagaatctcattattggctcgttagtgaaaatatatgtgacatttttaagacattttcaatatataacagctcactaaccaggtcctggtgggtatggatgtgtacctgccacaaagtattcaacttcttgtcctaaaaaaacacaaaaaaaatcaacagtagtgaatttaccttatacaaaagttatcatctctttaaatgtatcaagtaatattaagttttcaactggatctatcaaattttctcaactaaagtcaagcctcagaaataagggaagttgatcacttttgctttgatctctgtaaaccatgtccttgaccatttgctatatagcaatggtatacaaagaagccctcctatcaagtgacaatccactctggtatttcttccaagcaaatggtttcctgtggaatcttgaattctctttacttattaagatttcagtatttaatttcatctttctgaattacagacaagatagatggtgtcctcacaggttaagaatattctccaattttttcctttaatctctactgtgaccttctccacactctaagaatctctgccatcattatactaccatttttatttcctataagaaaaaagtcatcaacagtattcccatgaggatcaaaacttccattataatacaggtacggccattaaatactgtacgaccacaataagtcctgccaggaggggcaaaaataacatattttatttttctgtttttaaaattcacatataagtctgacatttctgataataccatactcaccttgattggcagggtactgtttatgaacatatgaatccgttgcattctgaggacccttctctttaagattttcttttgaagtaggcatatgcaacacaggaccatactcattacgaagcttgattgccatttttcgtttgtgactatttagaaattataaacataagaacgtatccataaatactttaaaacaaacacttagcttaagtttgcccattcacgtagaaaaagtttctagtatgattttaagtagtatttaaaagaatcaaaaatttccaagggcatttccccaccatatctgttcttttgcttacattcgaccacacagcattcattaaacctacgtaatattttagtttgttacctaataaatagaaaaccttttatgataaattgtcaagggtctgactgaaagatatacagaaactaacataccctttaagaaacctcaaagtcaatatactttccttcaaaatataaatatagtaaaaactctatagcaacctttactagatgtatccaaacaggttagttagaactaatcaaagtacttaattggttcaatatcttaaaaagaaatgcatttatattacttttaaaaatagtctactttataaattaaatataaatgcttgtttgaggagttaagtagattttaaaaaggtaaaggacaaagaaggaacactgcacataatgcattcccagactggagctggatatgtagaaccaaaaatatgccaccactcaaaaatcttcatcatactaacgagaaaagatgggagtagaggtactagccaggtacaatttcagctcagcaaggctctgagagcagcgggaagctgaaagcacatacaaagtgattgattataaaataaaatacctaaaagggactctcttaattactgggtatttgtaaaatgcaattaattaatggaacttttactgtaaaaggccaaaaaaaaaagttaaatcagcttaaattatgccaaaacaccactcattattgaataattagcccatgactagcttatctttaaaggactccctctccctgctctcttcccctagtattagaatgttaagtattttagcaattgaaaaaaaaaaactacaccaacctctcttcatctaaaggcacaggttttccattatcagctacaaacatgtcatgggtcctcttcaacgacctgaacacaagggtgtgtacagaatgtttctgtacctcctaaaaaaaaagaatgtaattacacacctatctacaaattacacaaatcataacctaaagtcagattgattatacacttcacgtgtttaaatatgtaaaaagctttataccactcaccatagctacttgttgcaagctacaggagtcaagttcagagaagaggaggaagctcctctttggctagaacctcaggtttagcaactgagtgatgccggagtttaacttactcaataaatatttactgagctcctactgtgtgtctggcaggtattgtgctagaatctcacaatagaatgataaaaaggtggtcatggtccctgtgctcaagaggaaacagacaaataaaaagtaaaataattccacattttgataagtgctatgaaggcaacaagcaaggcgctgagtcagggaatgaaggactaagtataattgtgaaagatttcactaaggtgatatttaagcagaaagggagttagccttgcacaaaacagaggtaagaacgaaccaggctgatggaaatgtcatgtaaaaaaaagttcagttaactgaaataatacaaggagcgcagtacagctgtgtatggaggatgagatggtgctttgtagctgcaagggtagacaaggtccagattaggtaaggtcttttagactattacaacagcctatattttgttctagcaacatagggtcagtaaagggttttaaacaagaaaggtatgaacaacttacgttttaaacagaacaacttatagaacaaaatggaagcaaggaaaccaaccaacggggagctaatgcaccagtccaggtgaaagatgatgttggtctcaattaaggtggactgcagcggatatggagaagagtgaatggaatcaataaacatgtggggtaagatggacaagaccagctaacagcgttggctgttcatgccagggaaagatgtaaagaacggcaagtttttctgggggtagaggtgaaataagagacgacctgaacgcaagatagagaagactaccaatcttttagggcacagactcactgacactgccccgagggcggcaagtaccagtggtcgatcaccaacagaggccccgcctccgaggacactttccagctcccaagagtcaaacgaggactggacgaattatctcaggcttcgcgcccaggctgaacctccgactcgggttctcatccggcttctaccccttccccgaaaacccgaagaagagaccactcggccttggccaaatagctcccctcgtagcctcttttctctctggactccaagtactctcaatcccccacgcgcactgccaaaaaaaacagtccagagacaaacgactcttgagagccccagtgtcactttacctcgaccatgatgctaccgtgtatcccacctccggcagggaagaaactctaatcactaacgcagtacccgccgccacagctgtgcagcaccttccggaattgggcgcccaggcggcggatgtgatgcaagctctgcgcacgcgcgctagtctccctcggccatctaggatcaggaggcgggtctccctcctcgggaccgcctctagggcggagtctcgaggctgaaagccggagactcctggaagggcctgggtggagggtttcactcgtccctctgaagaaatcttagaattatgttttctgccttagttggggtcctggttgttcgtgctgtattccccggaagcttaacgctttttattcagagaacctaagcgtctggagagcaaactcccgtgggctctatctaaggcatttccactaccttgatctctttggaggtcgcctgcgtgctttgtgtctcctggttctaatcctggcgagaagcacttggacacttgtaggcttaacacctgaaaacaatttcgcttaaacagtccagtaaacacttgttaagtgaacgttgaggaatagctgttttaatttggaaaattttgacatgtagttataacaaaaccccatatttattttctgctaatagatttttttttttaatttctcaaaactgcatagctcttgtccatttcctagttgcctgctgattattgtggcttcaacaatgccagggtacagcttttcaaagctggtagaagacacaattggagactttagccatttttatttatacatatccttgtgccaagtattggtatttttgctttctaccctggtaaaatctgtggtttgtgatcaaccctacccaattatttttctatgtaaaaaaaaaaatggatggacttaggcatttacaaacttaaatagacaaacattttactggccctgtttcagtttcactaatcctgtcctgagagcatactgcttacactttgagagggggaaaaaatctagcaaaagaatagcaatataaatcaaccttacttggaaattcattaaaaacattaaggtcatgggtttttgtttgagacagagtttcgctcttgtcgcccaggctggagtgccatggcgcgatcttggctcactgcaacctcagcatcccaggttcaagctattctcctgcctcagcctctggagtagctgggattacaggcgcccgccaccatgcccggctaatttttgtatttttagtagagacagcgtttcaccatgttggccaggctggtcttgaactcctgacctcaggtgatccgcccgcctcggcctcccaaagtgctaggattacaggcatgagccactgagccctgccttaaggtcatgtttttacttgaagatacagcatctctgaatttaactgtgagtttggcctaagaattgcttttctgtaaaggtggcaggtgatggtatttccttgcaagaaaataccataattgtaaaatatatacttgatgaactaaataatatactcacctattaataataactatagaaaataacatgatttgaaatgacaataaaaccatagaaacctaagcaagactaatatatatggcaatatattaattgtctagttggatctattaactttttacatatttaatcatcctggagacattaatttaatttctcaataacaacatggtaatgattgaggtaaattgcctcgaatttgctccttttaaaacactgtcgtgaatttatagaatgatgtcatccccttgaaagtttacaatattttagataaatatagaactcaagtgaccctattatttagttcagggattcatgaattatgtatattgtaggaaaattttgtatttatatgggaatatgttttattttctggagaaaggatccacaagtttaattggattcctgaaaggctccgtcatacacacatggcctggctgacacccgaagctgccttatttgaacagcaggtgtcaccactgctctttgtacgggccctcagggctgtccttaaagcagacacggcaagtaacttattaatataaattattagtattatgtctgtgtaaaaccaagaatacaagttttaaggaaagccctccttctttaggcaagattttttaaactcaccaatacagaaactctttttattctccttcaaatattgtcctttgctcttgaacagtgataggtcatatgagtatagatttgagtgccattttcatcagctttttatgatatttttataggaagtgttttctgattcttataaaataataaatattactatttatttttctgtttcaacttagagggttaaatatacaagctttaaaaaacactatatgcaatgttctttagagttgtgtggctcagtatgtccatcccttaaatttcatatttgaaattgttcgttaattcaaaaggaagtaatcatgggagttatcactgtttatttgaatttctgaggtcaaaacctgtgaaaaatgatacttggacatttcttccaaaactttggtctttaattgtttagcacaatgctatgaatttgcctaaatactaaggtagtgttagcagatactttcttgtagcatagttgaaacaagcttctgggactataaggaacagtgaaggggctgttcttcctgttaatgcctggaaagactttgggaataattagattgtactatcagttataaactgtcagttataaatatcttagcaaggtgtatgtgtgtgtgtgagagagagagagagagtcctcgggtcttacttatcacaatttcaccatcctctactacatgaagccccatctcatgtgtattagtttgctagggctgatgtaacaaagtaccacaaactggatggcttagacaacaaatgtttattgtctcacagttctggaggcaagaggcttgaaataaaggcgttggcaaagttggttccttctaagggctgtgagagagaatgtgttctatgcctctcccctaacttccagtagttctctggcagtctttgccgtttcttgtcttctgctgcatcactgtcatgtctgccttcatcttcacatttcgttctcactgtgcatatgcctatgccaaatttctccttcttaaagaacatcaatcatattgaattaaaggcccaccctactccagtatggcttcatcttaactaattccatccaaaaataccctatttccaaataaggtcacattcttagatactgggggttaggaattcataatgtgaatttggggggacacagttcaacccacaacactatatcacaaaataagtgacaatattgaacataatcatgacttttgttgtttacctttacaaataagaatttgtacttacaaatatttgcaggcatttacaaatgtttttattttacagaaatatttttggtgtttatactgccacagaagaaataacaatgtcttggttccagctttcttagctgaatgttttgttgtaatatttgtttaaatatctgtatttcccagtagacttatggggtgaatatggcatgatgtttactatcacacagtcagaatctaattgacttgcaactggtaagttttcaatatttattgaatgaatgaataagtaagctattatattgtacacttaaatatgggtttaggtggctttgagagcttaattttttttgagacggagtctggctctgccggccaggttgaagtgcagtggcaccatctcagctcactgcaatctctgcctcctggattcaaatgattctcctgcctcagcctccggagtagctgggaatacaggtgtgcaccaccacgcctggctaattacttgtatttttagtagacatggggttttaccatgttggccaggctagtctcgcactcccgaccttaggtgatccacctgtctcagcctctcaaagtgctgggattacaggtgtgaaccactgagcccagccgagactttaattttgatttggagttgcagctactgaacatgtaggaaggatggtctgtgagtgtgtgtgtgtgtgtgtgtgtgtgtgtgtgtgatgtgctcactccgaaaagttgctatttcagtaaccattaatttaatcacagtctttctgtgtgtgtaatgcagataattgcttataaaaggactgttcagttctgtatttctgatctttgtaaattttatgacaatgaaaaatattttccattacatttaagtaagttaattctaaattttatttagtttctataaaacttagcaacttagttacaaaatacaatttatctgtagaaatatttgcaacagtcagtttagttagcagaaataccttttgacatgaataattaagaagagtaaggcatttgattgaatattttactattattattaattcatatttatagatcccattatatttatattacataatgctatttagacacttcaggctttcttttagaaatatgctaccaaaagccagaatcatgttcacagagaaatattaaaaatattcttattagtcacaatacaaggatgtccaccatcaccactattatccacgtgtattttttatgaaagcactagtcattcaattggacaaaaaaattaaattgtgtaaaataggaaatagggatgaaaagttatctttatttgcaaacggtatgactttctacctgaaaaaccaattgaaaaaactattcgaaacaatatgaaaattcactgagtataaaaatgttattaaaaatcaatagttttcctttatgcagttaaaaatacagcagggaaagggatttttatttaaaatagcaataaattttaaaatgtgcaagacctaaaggaaaaaaaaattaagagacgtgaaaacctgaatcagggacctccctcctctctgtgcatgtggcctcactactgctgcttctggagggactgaaaaatccctgagaccagcatctcagggatgctggtctggcagtcagagaggtctctgagctgacaggatttcctgaaatgctgtgaaaattttgcatcctgaaatccatgctggaatcctggctcataatatcccaaaaggtaatgctgacatggccaggcctgattgttgcctgtaatctctatcccttcctgaagacagtggcttctccaggtgtaatggttgagaggctgttgagcaaattggtactggtagagtaactttactgagagatgccaccaaaaaccacaatccagtgacagtggtgtgtcagaggactatgaggcagtgtccacagacaggcagagctccaagagtaaggacaccttcttggagactaggtgccagttagtcttgaaggcattcacattcacttatatggcacaatatgatgaagcaatttcagattacctcaggaaatagcacagtaaaggaatatctcagatgcccttgcagtacagaatgatccctcatcagactcctgtgcagctatacacactgaagcctaagcttcccatcacagttctaaatggagcccctggatttaaaaacttttgtgatgctttgaatgcctggcagctggtgaaggaactcaaagaggcattaggcattctatctgctgcccttttcaaacatgtcagcccagcagatgctgctgttgaaattccactcagtgaaaatgaggccaaagtctgcatatatcataagcaaagttaaaagacaaatgaaaaattgggaaatataggcaatgtgtatgttagccacagggctaattttcttaataagaaaagagctctcatgaatcaacagaaaaaatgaacaactcaaaagacaaggcacatggacaggcagttcacagaaagaccactgacattgtggctgatatgtaaattgaaaagattctcagtgtgctcatgatgaaagaaattttaatcacaataacaataagataacatatttcacctaataggttggcaaaaaattttaaaatttgacaacaacaagtgatgacaaggatgagggacaacctaaatattgatgagagtataaatggtggcaatcactttcataggcagtttagcaataagctgacaatttttttcgagacagggtctttctctgtggcccaggctagacttcagtggatgacctcctggggtcaggcagatcctcctacctcagcctcccaaatagctggaactacaggtgtgcactatgatgcctggctaattttttaatttttttgtagagacaggtgtctcactatgttgcctaggctgctctcgaactcctaggctcaagcacccttcctgccttggcctcccaaagtgcagggattacaggtgtgagccaccactcctggccccaaaattgtttgcataccttttgttacaatggatttactttccaaaaatgtccttggtatgtatgtatgtgtgtttgtgtgtttgtgtgagagtgtgtatgtctgtatgaatgtatgtatgtattatatataatcttcatagaaggatgcaaagatatacatacacaggtgttcattttgctaaggtaggaacaccacatcaatacaagagaaaaaatagctttgtacataacaggaagaaactgtccatcatagtaggtaagggtatagagtcagaatgccatgattcaactccttctctgcaagttacctgcagcatcatcttgggtaactttcttctttttgtacttcaattctcccatctgtaaaatgggaataatagtactactctacctcatagagttattgtaagaattaagtgtaacgtactagtaacagtgaccggcacagaattacttgatccataaacattagttatatgatactaattatccccgttgttctaaaaggggagaaagctgcataaatgtaacctagaagtcagaggtcaacacaggcagcttctattttcatcctaaactaaacctaaagtgggcctcgattctccccacaaggaaacctagtacacaaaatactagttagcacatatattagtctgttctcacactactgataaatacataccaagagtagataatttataaagggaagaagtttaattgactcacagttctgcagagctgggaaggcctcaggaaacttacaatcaaggcagaaggggaagcaaatatgcccttcttcacatgacagcaggaaggagaagtgcggaatgaaacagggaaatccctttataaaaccattcaatcttgtgagaactcactcactatcacaagaacagtatgagggtaactgcacccatgattcaattacctcccaacaggtccctcccacaacatatgaggattatgggaactagaattcaaggtgagatttgggtggggacacagccaaaccatatcagcaaagtagattgaaacattgagcaaataacaaaggattgaagggagatcctggacccaatagcatactttgtccatcctcattcaacttgcgtctttttcttagtttgtcgttacctctttattatgtggagaggatagagatttttctgcccacgtctcccccttccctaacattgtatccgtgtttctagaaaccagcctttctggctttctttgatttatatctaggttccatattttttcaagtacatgtttgtgttttttaaaatatatatatggatatacatacatgtatatatatcttttgcccatttttatctatagggctcatgctttctcatcaaactgtaactcttcataaaaattttattaaacctttgtctaatcctgtgcacattttacagaaaatattgttaatctaattcaagtaatacttattagttattaaattgtgaaagatttttgaaatttttgaaatgcatgttactgacatgcaccaaaataaaagtcctcattttccctagagtttcactgctaatactatcagactggctgtcttatttttaagcataaattccatgttggaaagagaagctttatattcaaataatgtaatccatcactaaaggttttcatatattatgtatatgggcggggcatggtggctcacagctgtaattccagcactttgggaggccaaggctggtggatcacttgatgccaggagttccagaccagcctgggcaacatggtgaaaccctatctctacaaaaaaatacatatatacatacatatatacatatatatatatatatatatagagagagagagagagagagagatggagagagacagagagagacagacagggtcttgctttgtcaccaaggctggtgtatagtggtgcaatctcagctcattgcagcctcaacctcccaggcccaagcaatcctcccacctctcagcctcccaagtagctggagtggctgagactacaggtgtgtgccaccatgcccagataattttttcattttttgtatagatagggtttcaccacgttgcccaaggtggtctcgaactcctgggctcaagtgatccttggcctcccaaagtgctggaattacagctgtgagccactgcgcccagcccatatgcttaatatatgaaaacttttagtgattgattacattatttgaatataaagcttctctttctaacctgcaatttatgcttaaaaataagacagccagtctgattcctaaaaatttgatcttaattttctcaacaaatgccaaaaatcatctcagtcaaagttaatgaaaggtaaaatgagtactatagaaaggacatcaggtgtctcacagactgggctgtgaagaatcaaattattatgtttggacgttttggttacttctgttgatgcagttggtaggctttccctctaaaatgctgccatggatataacatcagtccaattgacccagttcccttccccttccccttccccttccccttcttcttctcctcctcctcctccttcttcttccagcaaatatcaaatttggagagacaatctggtagatttagcttgcgtaaagggtctgtctacccctagcttggtcacctgtggttagagggtcagggtgttgtagtactgacaggaccactggagcttcatacctccattttaggggtcattccaggagaagggagcagcactcccagaggtgttcattacacccttaatggttgtgggtctcaatgtgacaaaagcagaagagcatctctatcttttcttagctcttgtgatctccatcctgttgtaggagaaaatgtcctattatcccttattaccatgctctatgtcagctcccataagaaatggaaactgacatctaagccagtagagggagacattccacaagagatggcgtcatctcctatttcttccccaccatatgctttcccactaaagatgaccaacaaattgcaggtgtcaccactgcactgctctcaggcttgccccaagagctctggtccagcctggcctccaactcgtcagtgttaatcaaggtaacacaaggaaaatatatacagagactaacaacttattacagtacctcaaaacctatgcatatttagacaacgagaatcagtattccttttagtcattcgttcatttatatattcatgaatttgctcaaccgatatttattaaatactggctatgtgccaggtgcatgacataaactgtacagtcattcaaaccaagtttcaagtctaaaagcccttttcctttgaagttcgtttccccctgaagaaagttagatccttaagttaccagtcccaaagcctcacctcccccaatcttaggctcaacactaattattgtaagtagttttcattttctgtctttccttttagacttaaggcttcgccaaggtctccccggcccccagcaaactacctgctatgaagtagatgctctgtaaatagttgttaagcacaaattgccttgtgctatggagactgggcctgacatgagttgtaaaagtatcaacaagtgtattgacaatgggtatcggcaagtctttgcccttcaagccagagagctgctgggcaggacagattatctctgttttctctgtcactgatttactacccttgacttatgcaatgacatcagctaat

SEQ ID NO: 355 - DNA, 194993 bp, Homo sapiens
tttgcaaggccaggtgatgaggatagcattcagtctaggtagtgtggtttttttctttttcttttttctttttttttttttttttttttgagaaggagtctcactctgtcgcccaggctggagtgcagtggcgcaatctccgctcactgcaagctccgactcccgggttcaagccattctcctgcctcagcctcctgagtagctggaactacaggcgttcgccaccatgcccgactaattttttgtacttttagtacagacagggtttccccgtgttagccaggatggtctcgatctcctgacctcgtgatccgcccgcctcagcctcacaaagtgctgggattagaggtgtgagccaccgcacccggccagtggtgtggttttccaagactgcttccctgtagtgtccttgctgggcctatggtaaggcgtcgccaacgagttgctcaagatctctaggtactaggcctcacctgccctctctaggttacctgctgctccactgtgcaactccacaatgttcagaggttggggtagggaaggggagggggcagtctagggcatttctcttgctaggtcaacagctggtactttcagcataatttcctcctcactgagcataagactggttataattttacctgcttctgagaaaatgttggagttaggtgatgttctggcaaaagaaactcatgaccaagggaaaagagcagtccaaacaggattggaagactaggggaggatagacagggcctggtagaatctcttcgagttcggagtcagatagacctggctttgaatcccaagttatcacatacatgtttctgcctttgaccacatttcttagatattccttattctcttgtctcctcatttgtggaatgagataatagtactcactaacaagtttggttgaagataaaaggagataatgcatttaaagcatcatgcatgtgtcaagtttcaaaaaactgcaattttcaggggtaagaaagcgaagaggagaggaaggaaggagggtgaaagggaaatatgaggagaaaatgaaggcaaagttggtcacaatggggaatgtaaaatggtcccctgtacctgtttacggcccgtgaagcacaggcacataaatgtacagacagttgcttaatctcatgtttgcatgagggaatttgctgaggaggaggtgaggctctcgtgaaacaagatccatgtgaaaatcacaagcatataggatattactcataaagccaccaatgtctggttaccccacatctcctcatattttctgttcttgctgcagagaggagagtctgagtagatggggagggcctggggtcaagccctggcttggatgactctgggtgaatcacagcacttgttggcaattgagagcgtggtctcacttcctagaggcatgatgaaaattcatgcagatgctttacatcttttaaaatagtcatcctagcctggtgcaatggcttaggcctgcaatccgagcactttgaaagactgaagtgagaggattgcttgagcccgggagttcgagaccaacttgagcaacatagtaaaaccccatgtctacaaaagttaaaaaagaaaaatagctaggcatggtggcatgtgcctatagttccagctactcaggaggctgaggtgggagaattatttgagccttggaggtcaaggctgcagtgaaccatgatcacaccactgtactccaacctaggtgacagagggagaccctgtctcaaaaaagaaaaaatagaaatcatccttgggcatctgtaaattgaagtcacactctattttgattgctttcctttggtttttaaaaatattgaagctgagatagcatgtcatgttgaaattgtgtatagtcgggtttcattatccacgaatttcatttcaaaacaaaaaggagcattacaaaatattggctatgaaaatggggcattgactcagggtgagaacctgtgtgtcaaaaacatgcctcatctctaagacctcacccaggtctaacattccagaatcccaggcagcagccttcggagctcaagtcttaccctctcgctgatcctctactgacccacgtccccctggtttccacttacggctcaggaaaggatgcatctcaaggatcctgggagcggaagtgaccaggcacaagggtctcagcaaatgtctccagattagagtcatttctcccactcagaaagccaacccccatggaagcagattggaggccgggctctaactgctcactatcctgctggactttgagattaagatggggaggaggcgctaaaaggggaatcctggagtggtgactgcccatggcttcaggcaagccccagagctctctatttctagtaacagtgccttcaagggggagaaaaagagagtgaggaaaagagatagaatgaaaataggaaggagagagagaagaggagagaaaagaaaggaaaagaagagaacagaagggaagaggaaagaaagcaggcagataaagcaaaggtcatctgacaagttctgttagtttaatattccatcggagtttcatccgggtacacttttctctgcaggagggtggtgctgggtgtgggagaaggatcaggacatggttgaaggggtcggagattgtgaaacgaggtatgtgactaagagaggaaaaaggaagatatgcatgaagtgaatgaacaaataaattggttttgggggtcttagagaaagagaggagaaaacaatggggaaggagccattccaaagaaaagctgagagtaccaaatagctaggtaaggttctggacagctgtggatcatcttatgtgtctgaggaaggcaaaaggttgagagctaaggagttagtgtgccttattttcattatttcttaaattcctatttatcccactccagcctccccttaccttcaatccccataagcaagtatttagcatgcttatatatatccttttgttggaacgcattcttgtaaaatgtgtattgtttagggtgaatgcagttttaatttatgtaaatatgtgtaatatgtcttttttcttttcagttagaaccatgtttttaagatccaaccaggttgcgaagagtacatctcttctaggtttcccactgcttcagaatgggggaccacgtgctttacatggcagtgcctaagggggacagtgacaaagctgattgcaactagggggtcgagggactggggatgggtagatatcattaatcttgggtcaccctgtaagggagacaactgacttggccacatccttcacaaacacctgcataacaaccttttactccaaatgcccataggaggtgaaggcactaggtaagcagagggagtatgttacattcaatataattgtccctttttgtgtgggtttccagctcccagtcaattctgctttgggggcagtagggagtgatcatatgagctggctggtcacgtgctgcaggagtaatccaagtcagtgaggccagtggacacacagcatctccctggggtgcacagtctgtcctgtggttggacagaggggagaaaatgttgagttcctgaattctggtatatgctcttcagctctactggactgtggtcaatgttgcctttgtgaacaccgcaagtcttccttgacttgagatttttcttggtctgtaagatttgagatttttgtaatgagaggcacccaacatcaaggggtcacctggagtggggaagaaaaacagtacattctgaataacttctagagggaaagtgggaggttatacctcttttatttaaaaagaaaataaattattcggattaccataacataatatgtacttctgttaaacaaactcaagcctagaattgcataaagaagaaagaaaaagatcacaacaaacctgaccattatatttcagtaaatttcctttcagaaatctttctctacatgtgtctatctgtgtatacacatgctgtttcagaaactgaaagtcttcatattttttgtttaataagttccttttgatggatagctgtattttctctagcatcctaggacagagaattttctgtacttgactaattatttttttcttcagataagttccttgaagaaggattcctaggtcaaaatgtgtgtacattttaaatgcatctcagtaagatgacatcaatttataattcaactaaactaacattgcacgaaactacattctttttttttttttttttttttgagacagagtttcgcacttgttgcccaggctggagtgcaatggcatgatcttggctcaccgcaacctccgcctcccaggttcaagcaattctcctgcctcagcctcccaagtagctgggattacagctactccatgcccagctaattttgtatttttaatagagacggggtttctccatgttgaggctggtctcgaactcctgacctcaggtgatccgcccgccttggcctcccaaagtgctgggattacaggcatgagccactgcgcccggccggacaaaactatattctaagatgtttgttcttttgaactctgaggaattacgtgatgtccacaaaatctgaaaactgggatgaagaggaaacttagactgcctctagaacttcattctcagcctaggagtcatttggaatatcaatccaagatcctaccctaccttcacagataaaactccaattaaacagatattatttctgacttataagtgacacctgctgagtctctcttctctctcctttgagcagatcaggtataatattctccattttacataagactagagaagatgaagaactatctcagtttgcacaaatggtaaatagcaggggagaagcctttcatcaagtaggaaaatatagaaatttctccttgaaaaaaatacttcacaaatggggaaacttggaaattctgttgtcatgttagtaattatcggggaggatttttgcacacaggttcaccagtgatttatcagttaagtcctgagtgtaactgaactttgctctgccccaggcctctgtcaataatagagtccagtaaggctctgaagataattaacagcttttccaaagtaattctttccctctcttaactaatttaggagttgtgaaattgaaggaaaggaaaattgttttggaaggatttcagataaatttatacaatttacatgaaacttcatattacaggtgttccatttcacagttaatggattatgaagaatgctgtgtgcagagtgttcagactgaggtgcagagattagcagatgtgtaagaagagaataactgcttaaagatgcggctcagatactgtaacccttagaatttcatggaaaactgattttcttgaaaaataatgcaaggtcaaagtccttttgtttatttattaggactctttgaacatgtctcatcggaattattggacttaccgtgttttaggaagtaacattctggagaaagctagggacacatggattaccttagccttcccactagactgtaatccccaagaggctggagagcacatccgtactgctaactgcatacctggcacagtgcctggcatacagtgttcaagtattattcaataatgtatgtggtagaatgattgacagataatttatgtggggaagatttgtgtttaaatgggagatcctgaaaatacaactcaatctctttttggtaaaatgtatggcaaaatctttttgagcataggcccttctctcagcagttgggattttctagttgttcattctcttgaactttacaatcaaggcttaattattgttttcaatcacagtgagatgagaatccttagagtctggttcactatgactgggattgttcctgtatgggggaagagctattcccaagcttagggctctcagttacagtgaattatctcacaaggatctttaattacaaggacctttaattatatcctgttactatagtgattattacagaattggctgatttaaataattcaaattgcaaaagaaaaatgaaggaagggtgcatcaaatgagaaggagagaactgtttagccaccaaaaggaaaatattctcaaccagaagaaaacaaaatctagcttatgctgtttttaaaagacacacctaaaacataatgacacagaacaattaggaagtaaaggaatgaaaagaaacttaccagagaattaccactcccaggaaaatccaaattagcaatatcagtatcagaaaaaataggttttaagacaaacgtgaccattataaataaaggggattgtatgtaacaatgaaaagaataatttatttggaggattgaacatttaaatctatatacgcccaataatacagcttcaaaatatataaagcaaaaactgatagaattataataaatagaaacttacttaatcctagaagattttaacttacttataaatcacctccaaaaacgatatcttaagcagcaaaaaagatgaacctcattaatgcaaaaatcctaaataaaagtttagcaaattgaacctaataatgtttgcaaaaatacttcatgtataagtgaggttcatctcaagaatgcaagggtactttaaccttaaaatatactctctaaaataattttctgtaataagttacacattaattaacagagaaaagccatgtgaacatatcaatagatgtagaaaaaaatttgagaagttttaaaatcagttaagataaaaaattgttagcaaactagaaatataaaggcatatctttcacataactaagggtatctgaaaaattgtaggggcccagcagcagttctctttgacctgctgccctcctgtctggtccctcattctctccagagcctggccatagaaactggaatctcacttccccaaggcaggtcatggaaactggaaccctcttgccccaaagtcagctttacagtctaaaaatattactataactttacaccagactttctgtgtaaaaactgactgtagataacctgacctatcttgtttgactgtaggtcataagaccccctttccagagagggtcctgccccatacccagaaggaaggaatggtgagaggcattcctacacagagaggctaagaaaaatctagacagacaggccttgctaggttttctcactcagtctgtcggcattaggtccaatcattttcctacaaggctgtccgtactttgttgaaactaagcataaaaatggacagtttcctctgtatctttgggtcttcattctgaaggctcccatgtcacataaaactataatcaaataaatttgtatgccttttctcctattaattcaacttttgtcagtgacttttagtgaaccctcggagggcaaaatggcagctttcctttcccctctacaacacctacatgatgccttatatgtaatagtgaacttttcatagcattctcactaaagtcaggaagaagaaaggatgcccataacacgtttctatttaacactgtcctggaagcccaataaaatagatcaagaaagagacataagaggtataaagactggaaaagaagaaacagtgttgttagcttgtggtgataccgttgtaaaaattgaaaatccaagaaaacctacaaattataagaatgttaattagagttcagtaaggttacagaatgcaagatcagtattaaaacatcagtgggactgggcatggtggctcacgcctgtaatctcagcactttgggaggccgaggccggcggatcacctgaggtcaggaatttgagaccaacctgcacaacatggcaaaacctcgtctctactaaaaatgccaaaattagctgggtgtggtggtgtgggcctgtaatcctagctactcgggaggctgaggcaggagaatcacttaaacacgggaggtggaggttgtaatgagagggtacctagggatgaatctaataaaacatatgcaaacatttataaagaataatgtaaagttttattgaagcccaatgtaaaggaaatgatataccatgttcaagattaggaggcacaatattataaagatgtaacttctggcattaaaacataaattcaatctagctcccaacacaattttttaggagacccgataggctcatctgaaaattcatatgatgagtaaatggccaagaatggccacaacaattttgaagaagggtatggtggtgtgagaattaatataccagataacaagactttgtataaaatatggtaataaaacagtggagcaccaggacaggaatagatacacagaaaaatgggccagaaaagcctggactaacatttgggcatatgtagacactcagaagatgacaaagatggcataaaagataagcaggaaaaggatgagttactcagatacaaatggattcatcagggaaataaaaagtaaaataacaatgcatcattttatgctcattgaattgtcaaacattaaaatatctgactgcatcaggtagtgataaagatgacgagaaatggaaatactacactgatggcaagggtacacatcagtaaaactgctttggagaggaagcaatttgtcagcatctaggaaatattaagatatgcattttacatgacccaacaattccacctctaggtgtatattttggagaaacttttgcacatattccagtgagactggcataggaatgctcattgcatagtcatttatggcagtgaaaatcaaatgttgctaaatagggggattaataaatagtatatatgtgtaaaattatagcagtggtatacacacaacttttgtcatttatggcaatgaaaattaaatgctgataaatagggagattaataaattatatgtatatgtacaattacagcagctatatgcataaagcagtgaaaattagatgtagataaatagggagattaataaactgtatatgtgtatacaaccacagcagttgtatgcataaagcagtgaaaattaaatgttgatgaatagggagtttaatagattgtatagatgtataaaactaagcagctggagctatttgtatctcaaaaacccaatgccgaatgaaagaaaatcaaagtgcataaagatatctgctattttttatgcaaaactcataaataccaaagtaattggtcatattatttagggatagataaatatgaggtgaatgcattttaaaaatagctgggaaggatatgtaataactttaggattgtagttactgctgaagagagaggtagagaatttggttgttgagggatgtaaatacagcatctgtgatattaaatgaatctttgttaaagaaaggaacagacaaggcaaaatatgaatatttaaagatttggatgtgggtaaatgagcctttgttatgtttttctatatatgttcaagtatttgtgaaatattttatgcaataaataaaagatcacaaatggatgatgaactcacagctggttttaagtaaagactgaataattccagtcaggaaaacacgaacaaaagaaaatgtgaaactttggtcctgagatttgtggcttgttaaatgaaagttgatcatatctcaggtttggaaacatgggaaagttgatcgaatctcaggtttggaaactctccttttgattgttctttgttgttcccaggagaagttccaagaaacttctgggtgcttccaagcatgcttgcatttttaaggctcgagtctggcagatgaataaagactggggaaatgtgtgttcagttttgatttagaattagtaggaaaataaactcagaggtgttcaaagatgagcacaaaaatttctgcctgaaaaaaatgccatgggtgagtgtcctaagataaatgttttcgcatatgtctgcatactttatttccggagttaaaatgcagttccccctccttctttaaaaaaatctattctaataaattttgttgtggcaaagaaaaaaaacttgtttcaagttaaatttttcatgtaatgcatgtttcacatacatatataaagaccctccaaaaaccattgctcaggtaataatttattaagtcaatttaaactaaacattactaccattgcaaaagcatttgctctgaaaagggactgaaaaatgcatcataaagttacatagttcagcaacaatatcaatattgattatataaagtaaaactactggcaaacgtcatttaagcttaccctgtaatttttaataactttataaggagcaaatgtgtcaccttaaaaatgtaccagtggcatttacaaattccttcaaactcatttacaaatacagtaataaaaattcctgagctcccttttcttacaccagtattcaccaatcaacatccatgcggtgttttatttgacccacatcctctttccttttcttaagaaaatattttatcacattcgtaaaagtatctgtgcttcaagtcagtttgtaagtatctgtttttaatgtgaacctgatgataacaagagaaaaatgcttaacattagcaggggcagcaggaattgaggggtggtgtgggggacagtggaggagatgtaaatacaagaattccagtttaggtgttgggacttccaaggtagaatacatctgacaatatcaaaaacagactcagtttcatctgcatagtttcgagggactttcaaaggtgaagccagcaggaattactctgcatattctggccaggaaggtccctggtgggggcttttcaataattctatttcttatccttctccctagtccccccactgctcccttaccccaagatttcaaagtttctattaaatggaagttgcatcttccagccccaaagaaactggggagatttagaatgtataaaacttgattagcaagttgtaggaaacctgacaaagttaaggtgtcagatgggattctggcaagatgtggcaatatttaatttctgttttctttccggaaagtatattcaatgcttttgaaaaattagctacatattacttctccagctcatcattaattgtatagaacctgtgtctggtgactgagacttcaaattttgcaccttaaaaatataagagggcccaagaattaaaggcagttggcttcaatataagcacaggagagccagcgtttctgtgactgaagccaagttttttagagcatgatactcaagtaagaaagaaatttctcattcttctgtaagacatggaattagagaattaagaggaggcagagaagaacttggaaagcaaaaccacacaccatttcacaattctggaacacggacatgaacagtaagtgaaactttctaggtttagatccattaaaagattatccatttacacttcatctgatggattttgtcagaaaagatgttgttaataatatggataaataataactgttcaaaaggattccccacttaaaaaaatgctttggttcttcctttatttcacaatatttaaataagcttctcttattggatctccttgtatctggttccatctcccctcatttttctcagcctcccatgttatagggatgaggtaaaggagggaaattttgtcttgcaatcataggaagggtggacataaaggggaagaattttttttgtccaacttacataaacaatgtcctgattatagatcttttggtaacaagaaatgtccaaaaaattgcttcagccatgaatgtgttattttgctcatctccatttcaaataaaaaaatagagcaagagtaggtaagggaattaaacatttattaagccaggcactgagctgggtattttcaataatgatgtgaatagaaatataactaacatattatattgggatgtctaagattttgtttggcaggcattggttttggcatgcagtaaaaatgaagatgttatgataatagcagttagtgttatctccaatactattgacaaagatttaactacccatgttgtcccctcaaaataggaggagataaatgaataaaaccatggaaaacagagagcacaatgtgccataagcaaagatttacagaatgaaaaatgcaaaataacaaatcagataactatagtcttctataaatctttaagtctaaaaaaatagacattacaataactacatatagaaatgagtttttaaaatcaaaataagataatttctggtaaatggctgacttttcccatatcatactatgtttgatgactaaaatcaaataaggaaaagggttatttctaggggggttacagaagtcaatttgtaagagatatcattatcatggctttggacaactatgaggtgacttatagttaggaaaaaatctgcactctatggttttgttggtttttcatatgatgacttactaagtattctttctgaatctttcttgcagccggtttttataaaatataaacatgtaagaatggttattcagaaactcttgcataaccctacaaagtgatgaattagaaggtgttaaaaaaaaaacccagcaacttaattataaaacaattacttctaatttctcacttagtgttggggaattttgcttggcattttctagggaaagaggaaaagcagaggtagtggtagctttgaaaatgtggaaccttatgctattatgtataacttcacttcaatatggctttacagaagacacagtcacccaacaggctggttctagattgctttggtttccacatgagacttttcaattgtttaaaatgaacgatgaagcacaaaatccagcctcattatgcaaagaacacttgagaagtgtcagcagtcacatgaaacaaagccgagaggctgactttcaaacaactgttggattgtactttaaatgtgtaacaccccagagcagctgtacaatgaatgacatagaatctttcttctagacaagattaggaaaaaattagtacattcacgctttcaacagaaatacattacatattttttcagtttgttttacagtcatagacacaatcatattgaaactacatatggataaattgtaagttattaagtaatgattttcattgtattacatgatgagtttcacaacatgaggattacatatttcaatatggcatatactatttttgaaccacataaagcaatatagtacaaaataatgtaacagttactgtaaagtcagtaatgccacttggcaaatacatcaaatatgccaccgaaaaccagtcaaagcatgagacatgacatctttcatttctaaactataagcagctttgaaggaaggacattaggacacaaaagggaggtagttactttaaaaaattcaaaattagcttttcaggaatttcataaaacaaattatttttcagcggtatcttcgccatatagtttttcagataacgtggaaaaaagatttttcccccaggatttgtgaagtgtgcacaaaaaaactcagactacattttgaggtttatccaagtgaagcgtaatttgaccataactattaaaggttattttttatattactacttcagttgctgaaggttttagggtttttttctttttaatcagcagcaagcagaatgttaattaatagtctaagatgatctgagagttaattaatagactaagattatctgtggtctatttattgaccacaccttataaacaggataggtttttcctattttgagactttacatgtctcagtactttctaaattgaaatcagagcattaaatcaagggaattgatgtggacaaaacagctgccagcatgatagtgtttgtgaattatgtacctctcttagacataaactcttagacataaactcataaaatctgttcagaacactgaacagatttagatttaccatagccaataaaatttggatttagtgggttagtctcagcatttcatggaatcctgagatgcccaaatctctggaaacttcctatttcctgttttactatctttttccttttatcaaaatgggtgccatgagggtcccagaccaaaactcaccatcctgaaaaacaaaagtctggggagagaactcctgttttattttcagatgatatatttgctaatcatagaataagttcagatcataattataaataggatttctctgaagcaatcaatctgtatttttaaagcttctccttcagacctccagtatctagtcatcgaagtaacttgggtttatttattgagacaaggtcttgctctctcacccaggctggagtgcagtgacacaatcacggttcactgcagcctcgacctcctgggctcaagcaatcctctggcttcaccttcccaagtgtctaggactacaggtacgtgtcaccatggctggctaatttttaaaatttttgtagagactgggtcttactatgttgcgtaggctgggcatggatttattaatggcttttgaattaactaaataattaatgaacatgggcttaatctctaagtatgcaaatctctaaatgggatatacttgtgatcttcaacttggccttggatatctgtgtgactgatttaacctttgactcagtcttttgcagtgccaaagtcattgttgatgaataatttcatttcttgtggatcctatggttgctactaactcttaggaaaatagtaggctctggagaaggagtaaaaaccctacaaatatgtaaagccaggaaggaaaaggagaagcaaggatgttaaatcaatctgagttggaggaacagatctctgtttttctctgaagcgttgtcacacaatctcatgtgctcactgcttcaggccaagggtgtgtcagcaaggctttcttgcactgcaccagggacactgacctgaaaccctggattttacctagatcatgagaggtcttagaaaccttttaggccaacctacttatttaacaagtaaggaacctgatggccagagtttaaaagactcatcccaggacatagtgcctacttagtcgtggtgatgtgatttagtcttggacattgagtgctcagtcactgtctcagtgacagcattattgtgcttgagccaaaaaggaagaaaaggaaatttgttcactcaagaacacatgagactttcgtcaatggcacatctacgttagcaatgcttgggatggtaattcaaagtcatttatatttttctgtttgtgtacaaagttccaatgtgcatgcattgttctcttcaggtttaggcatgtaagccaatgacattcaaaaatgtatcaataagttttggtatggagagtctcaaatcacagggtggcaggtttatccccaaatcacagccagcctcaatttcttatcaggcaaagtaagtcacactattcacaacagctctgtgttgattcaattaaacaatacgtaaacattcactgaacattgctggttggcccttagaccattttgttgtgccctttctggcttcttctcatctctccattcatacatatctatatctatatctatatatatatataatccctataaggcaaatgttactttctaatcaatacatttttccttgcaaaatgaaaactttaaaaaaaaatagaggaaggcactttgtaaaatgtgcacaaatctgtttctttcttgtctactctaaggagatagggaagttgctaaaggcagggccaagtctttctgcaaatgatgggcagtggtggacacttgaggaaagagaaagccagagtttccccagagctaaactgcaacttggaatgcagggacctctggttgctcaataactcataggcttttcacattcagctgggtcatcacaagacacagagcaaaactgcccagatcttgtacaggcagtaaaggattgaccccttcagaccaagccagttaaagtgagtcttttgtacttaagtgactaccaggattggtcttaggcacttaggaaaatgtagagtctgttatatagctaataaatgtaggatctgttaaatatctgacacagctgatataacttgtgcttatacacatctgttagaatgaattggaacatcttgctgttcaggttgtaagctacacaaatcacccgttgcctagattcagtttccatgcgccttaaaacttgaatatttaggtatttgtttataaaaatacaacttattataactcagagtgtaaggatacatgagccaactgtgcaatggttgttaacaatctaggatggtgcaaggaaaaaaattaacagccaaatataagaaaagagatttggggctgttggattcagcaaggaatgagcatggcttgattcagtaaaagatcatttttctaaagattagtgcctcattcaatatgtctcttctcaatctcctgcctctttttttaaatgcctctttctacacatatatttgcacataatcttagaatatgattctgtacacatttcacttataaaatacttgtgcaatatattaagaccaactggaatggacggtttaaaaagcaaagtataaagagcacatcactgaagattactttgtatttctatgatgaagagcaattttttgttagattaggatagaaggcattggttgggattatctttgcagaaaaatattcagtgagtcatggaatcaaggagtcagtttcaaaggaccttagaggttatctggtccaacatcttcagaggaaactgaggcttagaggggggaattaatctctccaaggcaaagcagttaggaccagaatctaggtctcttcaccgcccccctgccccacatgtatccttccatttgaacagctgtctccttgatagaccacaaaaaaactttttgttagaccacaaaaaagcttaattcagataaacagtgctaattgatcatagaattaaagtcttggcctaatgagtggctaattgttttttagggatttaattcaagtccttagctgtcacattttttcatacgtattatacaaaattatatgtcaaaagcagattacttttatgtttaggttttcagactataagagtgactgatacatatcttctctattcttagagaatagactatgttaggaaagatttagtctgcattggctttgagggtgactgtctttggttaatgtctctcaaggtagattatattccttggcctttcagaagttgtgcgtagttttgcaggtcattcttttatgtgaattcatataagattcagcataatgtgaatcttaaactactgatatgtttctttttttgcctgcttacatgcagtgttgttcattgcaagtcaaacagacttgatctgtcctttccaaaagaggattgttactatgaactaaaataacctttagtggaaatggttgtctagaacaatgcttctcaaacttcagtgtgcaattgaatcatttggggatcttagtaaaatgcagattctgatgcttaagattctgcaaatggaattttcaaacactgcccaggtgatgcctatgcagttggttctcagacagttaaagtatcgaggatttaggggactgaatgagcttggacaactttcccacacgcttcccttactcacatgatattgtttatatattagaaaaatggagcttcgtatctattgcttttgccattctcaaaacattggcaatgtgttcactttcaaacaggagggggacctctgagtccagttgctatcaatatgggatagttggggtggaatatttaactcccagaggtgagctcaagttctctatgtccagctagtaaatggacatatagaatggatttaccatcaagtgaagggaaaaatagagaggggctgctagatgagtcatggatgcgccctttaaaatgaggatccaagctttgacttctttcaggaagcctggcactggaattgaccgggagattctcattaccttactctgacctttggagctattcccattgctctgggaagcaaatacctagtttcccagaacttttatttggacacttctgatatgagccatttctgcctctgccaagattttgcaattgaatttacttcagagagacactaactcctggctttgcttaaaatttttttgtggcccaagatttctcacaaaagcaaaacctctctcttttaaacagctgttagaaatcgtcgccctccctttttatggtagctttaggaagattcacccattgatgaacaggagtcccagaggagcctgaaactcaaaggagaaataatttctggtctgtggagaatcctaaatccctaggttggtggtggtggtagcagttgtttaaagtgtcctggagatcaaaagaatcagataaactatactatattgcgttgaaaactgaattttgtcattcacttcatatttcacagtgggctttgggttggtatggcattttactccacaaacgggaactttatatactactatgtactgtaaatacacattataaccttgcagcagaaaatactgtacccactgaatacataaacagctgtactgggaaaatagaaaatagtcttttattttacctaagtcatagaaaaatagtcttcaaaaatacagttaaacttatgggtttatattaaagtagaatttgtatgtacagtaaggcagtaattccattagcatcctgctgtggttttcttttcaagttagtctttagggaatttttttttaactaaggaaagactaaggtgtataataaattatctatcatgctgaaatgaaggaggaaaacatcctaaagggattcacatgaaattcatttgccccttgtgtaagaacatttttatttccaaactatattttatagaagctttagagtagaatttagggggaaaatccatgcttaacatatctaaactattttaagaaaaaattggaggcattatttcttacttgcatatcagcaatgtgtcagtaaggtataggaacttatgtaaacaatttgttctggaatgcattctttctttaaatggttatatttgggtaatcctaataaaatggacgaggagtgtaaaggttatgcagttgtttttcaaaagcaattttcatggcattttcctatgtggaaaattttcttttgtcatctttctatggtaaacaattttgacaatttcatttccgtctgtcccatgccaaatcatgaaagccttttccagaggatatacctattggcattgtccctcaagaatactaagcagtgtgcttttatttcattgaacacatagttttataactaacagcaaaaagtaaatctacaaatcacagttaggaaacataatgatttgttctggaatcagctgctggagaaagaggcaagtggttaaaaatggagcatgaaaggagctgggagctttagtagtgtcagtctgactacattcttgagcatttcacgtactctgtagtgttacctgaagaaaaatcacattttaaccaatcattccattagtcaagctatcagtgaaaggagtgtgtaaaacatgcgggatccaggtaatccaaaccacccagctggagcctgcacttgcttgatgttgcagtgaagttggccagggctttctcagcttgattctgttcaagtgatggtggggcctctttggctgattcttcaaagcaagccacgtttttagcatgtggatctggcaccaacaccaggatgttgttatccatgaccccggacaccttggcatactccttattgttctcaggagtcccgggcttcttgggcttgccgctgttctctctctgttttggtagcaatgataatgcaccatctttgttgaccttgtgaatctccacataatccaagggtttagcggagccaaagggggttttctcctggggcagcagccagggcgtatcctggtcagtctcagaatggaagctttctacctccctctgctgggttgcctttccctcttctctagacttaatggtttgagaggattttaaagcatctttacctgcttcattcaacagagtggccggtgcacctgcagggcccacagccagctcacacacatcagtaatattgtggtaagaggatctggggttgtgctggctgggctgtggtaagggccatgttgaacatttggatccaccagcatgaaaataggggattttgccttccatgcttatgcactgggggtcccaggtgtgggttgtttcaggattctctggcttctcaatgacctcaggatcatagaatgtggagggattggcctggggttcctcacacttttcagacaaaagggaagggctgtcacagctcccccggcctgagtcagtgtcaggatccaggtatgtgggtttcataccttgacttgggtgttcttttgaatggactgacattagatgctggtcctcactatcatctacttctaaatactccaccagcaagtcctcatagtcagaagtgggaggaaagtcttggcatcccaaggcactcagtagttcttcagacttgcccttctattaaaacacagacacaagaagagatggctgttagcttcataacattccaaatcagcatccctgctaagtggtgctgttcattgccacaagcaggtgggaagatctcaaacttcagacatttgtgtgccaggccatctagaatcaccttctggatactattcagcagatttttttttttaaagtcaactcaggatatttaacgtagtctctctccaagcaataataatcatgagtttaatgggcaagtagtatatacacatacaataataaacagataactataaaatgaaggtttgtgaaacttctaaacccacagtgcttatgcatgcatctgacactgcggcccactggcagaggtgtggttgctggcctgctaacttcctctatcactttctagagtctggcaatagtaagtggattcttgtcttttccttctgtggttcatcttccttctctccttcctcttcttatttccccttcccttctcctccctcttcctaatctactgttttcttctactctacttcctctccctccttctcttctcccccttcatcaccctattccatatttccgcccttcctattattctccctgcttctatccttcctttccccctcctatttcctcctgcctcctcctctcactcttgcctcttttttttttttttttttttgagacggagtctcgctctgttgcccaggctggagtgcagtggcatgatctcggatcactgcaagctccgcctcccgggttcacgccattctcctgcctcagcctcccgagtagctgggacaacaggcgcccaccaccacgcctggctaattttttacatttttagtagagacagggtttcaccatgttagccaggatggtcttgatctcctgacctcgtgatctgcccgcctctgccttccaaagtgctgggattacaggcgtgagccaccgcgcccggcctcttttttcttatcctctgacttgggtcaggtactgacctaggtcttggctttatcacttattatagggtatgtgactttggacaagctgctctctgaacttcagcttctccatttttaaaaggtagaaaataatattaatactacccatctgggagggttcttttgaggattagaggtaatatcattaagaatactaacacatatttttgagacaaaagtagctattttatcgttaagtctctgtggctagcaggttaaattgtgagctggacagtaactagtttagtttgctgagacattcatgctggttctatcaggccaatgctacactggatagtggaggaagagcactgggtcaggagctgggactcctgggctctagtccctgcttcgatatttgcaaccaaagtgaacacagacaagccagattatccaggactcaattcttctattcttacactgtcagacccagagcagctgggtcaagtatttgccttaatgtacagctagttgcttttatatatgtcagtgttaagcttaaaagccaaactgaaactatttatttcaatttggagaaaaatttaaaactgttctaacctctcttttcattcaaaacactcattatttaattccctcttgaatcagcccaaatgggtcctggcaaacagatggccccacagtactgatctggtctcagctgagtgcccaaagtgagagataatggcaatgggatattctgttactatggctttatgtaaagaacattcaagtagaagcttttaccaatgtatgattgagggggtggtggtgggtccctgttttgcattaatcaaaatattcactctctttctaaattgattatttgtataaaatgtttatctctatgcttatgagtagatctgataaatcaataaatgtgtttccatgttttcttggctttctctccttgccctctgacatttagtgtgtgaaagtaagtaccctcatccttcacacaactttctgttaacacacatgctgaccaggagagacagtccaaaaaggctggctgaaactaccaggctgaactgacggggactgtgtgtgagtgtgtagagttaattactacagagcagtgagtcacactccatttttttgcctcctgtacttacctccaacagatgagcatcaaatccttttatttttggcccaggaactggcggaaagatgcaggtcaccatgctataaaataattcatgagattggctaaatgactcatttctgactttgtaatttttgaaaggttagtataatagccactatagggactgtgatagagataggacttggtttggcagctccatgaaacaatcaatgatgaaaataaaattacagaggcctatattaaaattaactttagctaattaaggaggctgattttgaagttagtggattatctggactatttgcttctcttgattttagctactcttgccagatttttactgtttcacaactaggaatctctgtttcatagaaagaacatcagcctgaaacgagtcaatttttctactttttatagcactgataaaagattttttttatgggcaaacacactacatctaatggctaaaatgaggattatctacaggtttccatcatctttgtatttttttttttgtcattatccttgactatcatgattgggaggaaaagttgagagacagtgaagtacctatagcccttcaaagccactgcccagacaataatcaaacagatgacagcagaaaggacagccacagagatccacacggttgtatcattcatggtgaagtctaaaaaacaaacagccagaaagctttgatcacgtacagcatcattaaaaacaaaccaacctaatgaatgaaactcttaaacccaagagtgttttcctccattcatatatttttttgatttgaacagcaatccaaagtatcatcaatgacagggctattctcttttaaatattattaatatgttaatatgttgcgtatattttatagtactctaaaaatttaaaaatcctttcattattctttttaattgatccttaaagaggaaatccaaggtcacatggtcgtttgcagtaataataataaaagctaacattaagttcttactaaaagccatcaatggtgttaaactctttgcctacattgctttgttataaaagataagaaaactgggaatcaaagaaagatttaccaatggccacataactatagtgttgcaggctgggatttgaactcaggctttctgcctctagaccctgtgcttttgttaagcaagagtcaggagtggactagatgcctgcctgatttgcagttcagtgccctttccagcatgccaagccaatgaaagcccgatactttggtcaggcaagttgttagaaaagctagactttcctgtgtggttttggaaaagactcctaactttgctgaggtttggtttcttcacttttaatttttaatgataatcatattctctgaatacctgggagggttgggaggaccaaataaggtacaggctttgtaagctgtaaagcattttaaaaatgcaagatggattgttcccttatagaacacaagctactgaattaaggtgctttgctggagctgtctatcttatatcctgtgtcttcactaagagacaaggtgccaagtgtaatccatggcagagactgagcctttgagacacggtactgccttataaattctggaagaactagaggatgaccttgaccaaatcctctaaatgatgggaatagggaagatggtgggagcataataactgctcatcaagccccttggggcatcagacccatgtctgtagccttatcctaaaattgttctccattgacagtaatccagggtgcaatgctgcttttcaaaatgtcttcgtattgggcagaaagattataaacccacctctattgttctggctaaggctcaaaatggtttctctattagtagttattatatgcaaatataccatttaaaacatatttagggacataagcaaaaaagagccaagacgctcaccactaggtatctgaatgaaggtcgctggactccatgcactccagtatccatggtctggtttgcagcgaacctggacaaggtatttctgtcctggatgtaggctgagaatcttaaactctgtttgctgcccagcaaaatggatctaaggtagaataaggaaaacagaagtcaattctaacatttgttgtgaagaaagagagttttcccctaaaaaataaactaagttaggctgaacaatcatatacagagaattccctgctgtcactactccactgtcttagccctatcttttccttctcttaaaattgctcacacaaaaatttagcaggttttctatctctccatttgggactctacttcagaaaagtcaaatattctgcctccttcccactttatgaaaaacaactacttaataaatgtagaaagaataacaaaattggccaggcatggtgcctcatgcctgtaatcccagcactttgggaggccgaagcaggcgtatcacctgaggttgggagttcgagatcagcctgaccaacatggagaaaccctgtctctactaaaaatacaaaattagccaggcatggtggcacatgcctgtaatcccagctacttgggaaggtgaggaaggagaatcgcttgaacctgggaggcggatgtttcagtgagccgagatcgtgccattgcactccagctgagtgacaaagcgaaactccgtctcaaaaaaaaaaaaaaaaaaaaaagaataacaaaattaaagaattgttagcctttaaaccctaatgaaataactgattcaataataaattggtgttaaaaacatgaggtgaaagagaattgggcattcatgtatggtaaagtagtagtatacaaattaaacatgaccttacaatcaagggatcagtttgtcatctcctcaattcaggggccagttttagcatcacttatggtgggtcaaccagatagtttttgacatctgattaaatacaatatagagtacataatatcacctctgaatttaccaattcttggtaaaaattgttcaacctacatctaatcaagtctggttacaggaaatggaggcgtagagaaattagctaaataaccccacaaagaactgatcagagaaaggtacaaggtgggatactctatgggacaagtggcccagtctcctcattacactgaaactgaaggatataacgaccagttacaatgtgtggtctacgagcagattctggtttggacaaagtagctgttaaagatattcggaaacattgggaggaattaaactagggactgggtattaaacgatattaaggaattttaattttcctatgtgtgatcctattattttggctatgtttggaaatgtgcctttttaaaagaggcatatactaaagtatgtaaagatggaatattgtaccacctgcaatttaatattatttctttaggtcaaagtattttattttatttttatttttatttatttattttttgagacggagtcgctcttgtcacctaggctggagcacaatggcatgacctcagcccactgaaatctctgcctcccaggtttaagcaattctcctgcctcagccttcagagtagctgggatcacaggcactcaccaccatgcctggctaagttttttgtatcttcagtagagactgggttttgccatgttggtcaggctggtctcaaactcctgacctcaagtgatccacctgcttctgcctcccaaagtgctgggattacaagtgtgagcccctgagcccagccttttttttttttccaaatggagtttcattcttgttgcccaggctggagtgcaatggcgcgatttcagctcactgaaacctccgcctcctgggttcaagagattctcctgcttcagcctcccgaggagctgggattacaggtgcccgccaccacacctggctaatttttttgtacttttagtagagatggggtttcttcctgttggccaggcatgtcttgaactcctgacctcaggtgatccacctgtctcggcctcccaaagtgctgggattaacaggtgtgatccactgcacccagcctggttgaggtattttaaagtaaataaaaacacagccattgactatggacgggatatactgagactgccccctcccaccttgtgccatttaagtactcttacaagggtctagatctaaaatgtactaagggaggcaggttggaaacctggtcaagtgtctgagcagtacaagaaactagcccgaggagagctgtgaagatgagcccccatcaatcccaatagaggggaaaagggcttttcacatctgggtgggtcacaactgcattggaggccaacacagtgacccagtaattaggaggaatgacctgttttcagttgtgagggctttatccttgccaaaggccatagttccttcaaaaagcatatggatcactcacctcccactcagctgctttctcgggttttaatcgaatttcatacaggagcgtgaaccaaccagtttttaagtcaatcagggtaggtggagaccatttaatccacaggtagggttttctgtcttctggctgttttacttccacagccagctccaaaggagggtctggctgaactgcagaaatacagcaaatgccagtagcactcattgcttgcaccttttctttggctttaccattttctattaggaattcctttttctgtttatcatctcactcttcccactgtactataagccccccaaatacccgggccttttgtcttctacctcttagtatgtgaccaatcatatttgtgcatacagatgaggtttacatggtaagaataataagcagctggtatttcattctccgcatgttctcgcttttcatcagttagaatctcatagctatccccataattttcatgatgacagagaccaggtgataaaaactgggctgggatttgcaagtgggagttggcatggaagactatagggaaagagatttcaaacagcttatttccctcagctgggcatgagattctccttagttacacacagttttttgtaaatgaactattcataatcataactctgcagataacaggtttacagattccatcttcgtttcagcaattacatcttatattcaacatacatattacaccctgtggtaaatgagatccactctcccataagctaaatggaggttgagctttttggcaatgatccttttggtgatttcataacagcctgttggcccagtcactcattcaacaaatgcttagcgaattcccattagcaaaatgacagctaatgtttctcgagtatttactacatgccagggactgtataaaatactatctctgcatcgtttcttataatcctccagcaactccatgaagtactattattgtacccattcattttacagaggaggaaacaggcttagaagagggaaattactcgcctaaggtcacatatttggtaaaagtgttatttgaacccataactatgtgacttagaggaagtggtctctactatttcactctaccatggttgtaagacattgcgtttgatgtcaggtgctggagagcaggcctgggattaggctgacgtgagtgaagtgcataggatacaaaattcaaggagggacaaatggccaagaagcacatgaaaagatgctcaaggtcattagccttctggggaatgcaaatcaaaaccacagtgagataccatttcacatgtactagcatggcaagaattaaaaaatgaaacataacaagtgttggtgaggatgtggagagattggaaccctcaatactgctggtaggaatgtaaactggtgcaaccactgtggaaaacagtctggaagttcctcaaaaagtcaaacttagagttgccatattgcccatcaattccactcctagatatagattcaaaagaattgaaaacagatgtttaagaaaatcttgtatgtgaattttcatggcagcactatttataatagccaaaagtgaagaaatccaaatgtccatcagttgatgaatggataaaaaatgtggtagaggccaggcacagtggcttatgcctgtaatcctaccattttgggaggctgaggcaggtggatcacctgaggtcaggagtttgagaccagcctggccaatgtggtaaaaccccatcgctactaaaaatacaaaaaatttgccaggcgtggtggtgtgcacctgtagttccagctacttgggaggctgaggcaggagaatcactggaatctgggaggcagaggttgcagtgagctgagatcgcaccattgcactccagcctgggtgacaagagcgaaactccatttcaaaaaaaaaaatgtggaacagctacatattttttatgattccatatatatatatatatatatatgaaatatccagacgaggcaaactcccagaaacagacagtcattgccagggcttgaggaagggagaaatgagaagtaactgcttagtagtggatgtgaagttttcattgagggaggtaaacgtgttacagaactagatagtggtgatggttgcataaaattgtaataaactaatgcattcaattgcatactataaaatagttgaaatggtggatatgtgttttgtgtttttgccacaataaaaacaaatgaagtggcttcctgctggcaagaattaaaaaaaaaatgaaggaggcatttacttctgtaggctcctgtaggtacaggccttgtgagtaccttcctaagacttaggtgctggggtgctggcttgcctcatcccagtctcagttctgctgttcagtgacattttctccattcatttatcacctccttaaatcaatctctgtaccagatggggaaagagtgactgtaactatagtgtacttggcattatgagttacatttgcctaaaaaccaacttttaaaaatttgccatccgtggtctggttccaagatggctgaataggaacagctccagtctacagctcccagcgtgagcaacacagaagacgggtgatttctgcatttccaactgaggtaccaggttcatctcactggggcttgttggacagtgggtgcagtccatggagcgtgaggcgaagcagggcaggtcattgtctcacccgggaagtgcaaggggtcagggaattccctttactagccaagggaagccatgacagatggtacctggaaaattgggacactaccactgtaatactgcgcttttccaacagtcttagcaaatggcataccaggagattatatcccattcctggctcagagggtcccaagcccatggagccttgctcactgctagcacagcagtctgagatcaaactgcaaggtggcagtgaggctgggggaggggtgtctgccattcctgaggcttgagattgtaaacaaagtggccaggaagctggaactgggtggagcccaccccagctcaaggaggccggcctgcctctgtggactccacctctggggccagagaatagctgaacaaaaggtagcagaaacttctgcagacttaaacgtccctgtctgatagctctgaagagagtagtggttctcccagcacagagtttgagatctgagaacggacagactgcctcctcaagtgggtccctgacccccgagtagcctaactaggagacacttcccagtaggggccgactgacacctcatacacccaggtgcccctctgagatgaagcttccagaggaaggatcaggcagcaacatttgctgttctgcaatatttgctgttctgcagcctctgctggtgatacccaggcaaacagggtctggagtggacctccaacaaactccaacagacctgcagctgagggtcctgactgttagaaggaaaactaactaacagaaaggacatccacactaaaaccccatctgtacgtcaccatcatcaaagaccaaaggtagataaaaccacaaagatggggagaaaccagagcagaaaagctgaacattttaaaaatcagagcacctcttctcctccaaaggaatgcagttcctcgccagcaacgaaacaaagctggacggagaatgactttgacgagctgagagaagaaggcttcagacgattggtaataacaaacttctctgagctaaaggaggatgtttgaacccatcacaaagaagctaaaaacctcaaaaaagattagacaaatggctaactagaataaacagcatagagaagaccttaaatgacctgataaagctgaaaaccatggcacgagaactatgtgatgcatgcacaagcatcagtagccgatttgttcaagtggaagaaagggtatcagtgattgaagataaaatgaatgaaatgaagtgagaagagaagtttagagaaaaaagagtaaaaagaaatgaacaaggcctccaagatatacgggactatgtgaaaagaccaaatcgacatctgattggtgtacctgaaagtgacagggagaatggaaccaagttggaaaacactctgcaggatattatccaggagtacttctccaacctagaaaggcaagccaacattcaaattcaggaaatacagagaatgccacaaaggtactcctcgagaagagcaactccaagacacgtaattgtcagattcaccaaagttaaaataaaggaaaaaacattaagggcagccagagagaaaggtcaggctacccacaaagggaagcccatcagactaacagtggatctcttggcagaaactctaaaacccagaagagagtgggggccaatattcaacattctcaaagaaaagaattttcaacccagaatttcatatccagccaaactaagcttcataagtgaaggagaaataaaatactttacagacaagcaaatgctgagagattttgtcactaccaggcctgccttacaagagctcctgaaggaagcactaaacatggaaaggaacaaccggtaccagccactgcaaaaacatgccaaattgcaaagaccatcaatgctaggaagaaactgcatcaactaatgagcaaaataaccagctaatatcataatgacaggatcaaattcacacaaaacaacattaatcttaaatgtaaatgggctaaatgctccaattaaaagacacagactggcaaattggataaagagttaagacccatcagtgtgctgtattcaggagacccatttcccatgcagagacacacataggctcaaaataaaggaatggaggaagatctaccaagcaaatggaaaacaaaacaaaacaaaaaagcaggggttgcaatcctactctctgaggaaacagacttgaaaccaacaaagatcaaaagagacaaagaaggccattacataatggtaaagggatcaattcaacaggaagtgctaactatcctaaatatgtttgcacccaatacaggagcacccagattcataaagcaagtccttagagacctacaaagagacttagactcccacacaataataatgggagactttaacaccccactgtcaacattagacagatcgacgacacagaaagttaacaaggatatccaggacttgaactcagctctgcaccaagcggacctaatagacatctacagaactctccaccctaaatcaacagaatatacattcttcccagcaccacatcacatgtattccaaagcagaccacatagttggaaggaaagcactcctcagcaaatgtaaaaggacagaaattataacaaactatctctcagaccacagtgcaatcaaactacaactcaggattaagaaactcactcaaaactgctcaactacatggaaactgaacaacctgctcctgaatcactactgggtacataatgaaatgaaggcagaaagaaagatgttctttgaaaccaatgagaacaaagacacaacataccagaatctctgggacacatttaaagcagtgtgtagagggaaatttatagcactaaatgcccacaagagaaagcagggaagatctaaaatcgacaccctaacatcacaattagaagaactagagaagcaagagcaaacacattcaaaagctagcagaaggcaagaaataactaagatcagagaagaactgaaggtgatagagacacaaaaaaccttcaaaaaaatcagtgaatccaggagcggttttttgaaaagatcaacaaaattaatagaccactagcaagactaataaagaagaaaagaaagaaaaatgaaatacatgcaataaaaaatgataaaggggatatcaccaccaatcccacagaaatagaaactaccatcagagaatactataaacacctctatgcaaataaactagaaaatctagaagaaatggataaattcctggacgcgtacaccctcccaagactaaaccaggaagaagttgaatctctgaatagaccaataacaggctctgaaattgaggcaataattaatagcctaccaaccaaaaaaaaaaagtccaggaccagacggattcacagccgaattctaccagacgtacaaagaggagctggtaccattccttctgaaactattccaatcaatagaaaaagagggaatcctccctaactcatttcgtgaggccagcatcatcctgataccaaagcctggcagagacacaaccaaaaaagagaactttagaccaatatccctgatgaacattgatgcaagaatcctcagtaaaatactggcaaaccgaatccagcagcaaatcaaaaagcttatccaccatgatcaagtaggcttcatccctgggatgcaaggctggttcaacatatgcaaatcaataaatgtaatccatcatagaaacagaaccaaagacaaaaaccacatgattatctcaatagatgcagaaaaggcctttgacaaaattcaacagccttcatgctaaaaactctcaataaactaggtattgatgggatgtatctcaaaataataagagctatttatgacaaacccacagccaatatcatactgaatgggcaaaaacaggaagcattccctttgaaaactgtcacaagacagggatgccatctctcaccgctcctattcaacatagtgttggaagttctggccagggcaatcaggcaggagaaagaaataaagggtattcaattaggaaaagaggaagtcaaattgtccctgtttgcagatgacatgattgtacgtttagaaaaccccatcatctcagcccaaaatctccttaagctgataagcaacttcagcaagtctctggatacaaaatcaatgtgcaaaagtcacaagcattcctatacaccaataacagacaaacagagagccaaatcatgagtgaactcccattcacaattgcttcaaagagaataaaatacctaggaacccaacttacaagggatgtgaaggacctcttcaaggagaactacaaaccattgctcaatgaaataaaagaggatacacagaaatggaagaacattccatgctcatggataggaagaatcagtatcatgaaaatggccatactgcccaaggtaatttacagattcaagctaccaatgactttcttcacagaattggaaaaaactaaagttcatgtgggaccaaaaaagagcccgtattgccaaaacaatcttaagccaaaagaacaaagctggaggcgtcacactacctgacttcaaactatactacaaggctacagtaaccaaaacagcatggtactggtaccaaaacagagatacagaccaatggaacagaacagagccctcagaaataataccacacatctataaccatctgatctttgacaaacctgacaaaaacaagaaatggggaaaggattccctatttaataaatggtgctgggaaaactggctagccatatgtagaaagctgaaactggataccttccttacaccttatacaaaaattaattcaagatggatttaagacttaaatgttagacctaaaaccataaaaaaatctagaagaaaacctaggcaataccattcaggacataggcatgggcaaggacttcatgactaaaacaccaaaagcaatggcaacaaaagccaaaattgacaaatgggatctaattaaactaaagagcttctgcacagtaaaataaactaccatcagagtgaacaggcaacctacagaatgggagaaaatttttacaatctacccatctgacaaagggctaatattcagaatctacaaagaacttaaacacgtttacaagaaaaaaatcaaacaaccccatcaaaaagttggtgaaggatatgaacagacacttctcaaaagaagacatttatgcagccaacagacacgtgaaaaaatgctcatcgtcactggccatcagagaaatgcaaaatcaaaaccacaatgagatatcatctcacaccagttagaatggtgatcattaaaaagtcaggaaacaacaggtgccggagaggatgtggagaaataggaacacttttacactgttggtgggactgtaaactagttcaaccattgtggaagtcagtgtggcgattcctcaaggatctagaactagaaataccgtttgacccagccatcccattactgcgtatatacccaagggattataaataatgctgccataaagacacatgcacacatatgtttattgcggcactattcacaatagcaagacttggaaccaacccaaatgtccatcaatgatggactggattaagaaaatgtggcacttatacaccatggaatactatgcagccataaaaatggatgagttcatgtcttcgtagggacatggatgaagctggaatccatcattctcagcaaaactatcgcaaagacagaaaaccaaacaccgcatgttctcactcacaggtgggaattgaacaatgagaacacttgaacacagggtgggtaacatcacacacaggggcctgtcatggggtggggggaggggggagggatagcattaggagatatacctaatgtaaatgatgagttaatggttgcagcacaccaacatggcacatgtatacatatgtaacaaacctgcacgttgtgcacatgtaccctagaacttaaagtataataataaaaaaaatttgccatcaattgcaaaaggactcatgttcacagtctatgccatcactccaccaagactgttaatggcccctctgggaaactgtggtgcaacagccgtggggctttccagaacatgatctgtgcatctgttggtgctgccaaggctgagggcaaggtcatctctgagctgaatgggaagctcaatggcatggccttccatgtccccaccatcgtgtcagtggtgacctgacctgccatctggataaacctgccaaatatgacatcaaaaaggtggtgaagcaggcatcggagggccccttcataggctgcagggttatacgagagttccgtgggcacttcttttatgattttgaaaaatatggtccaacatagtctttcaccagagaatttgttttccagaatcaatgagaatctcatatacacttgatttctctttttaaacatactacttttctatagtgatccccttttttgtggatcacatttattaaaacagttactaatttcagaacatttcttgctttcattgttttaccttcaaatattataatgcttgagggtaaggcaatacacaaacacacacacacacacacacacacacacacacacacccctcctgggctacactaagcaccaggctgtctcctctgactttaacagtgacaccccctcttctacttttggggctggcatcgccctcaacaaccactttgtcaagcccatttcctggtatgacagtgaattaggctgcagcaacagggtggtggactcatggtccacatggcctccatgtagtaagacccctggaccaccacccccagtgagcacacaagagcaagagtgagaccctcagctgctggcgagtccctgtggcactcagtgctccacctcagtgagaatctcccctcacaatttttatgcagactccctgaagagcaggtgcttagggagacccactttgccatgtgccatcaataaagtcccctgtactaaaaaaagaaaattgccatcaagtctaagctaatatgttactgagtaaatacctaagaaagattattttgagcacatttcctaaacaaacagcagctaattaatatatgttttaagttaaatacatactaaacaatgcttctgataaaaaattatacaaaaacgcaaataaaatgttgaggatgtatcttttagagcatactttcccaacctcagcactacttgcattttggactggatatttctttgttggagggggatgtcctatgctttgtagaatgcttagcaggatctctgggctttatgcaccacatacaagtaatacccccatctccccactttcctagcttgtgacaatcaaaaatgtctccagtcattgccaaatatcctgtgggaagaaaaaacagctcccagttgagaaccactgcttttaagtgttttcaatgtaactaaatattactcaacaacaaagaactctactcctgagcaattatctttcaatgttgtcattctgtactgcaggttattgctggatgagagtcgaagtgtcagaaaatgtaccgtgcattttaaaatgaacttccgtggcctgtcccaacactgtaggctgcagggttataggagagttctgtggacacttcttttattattttgaaaaatatggtccaacatattctttcaccagagaatttgttttccaggatcaatgagaatttcatatacacttgttgatttctctttttaaacatattacttttctttagtgagtccctttttttgtgggtcgcatttattaaaacagttgctaatttcagaacatttcttgctttcattgttttgccttcaaatattataatgcttgagggtaaggcaatacacacacacacacacacacacacacacacacaccacacttatataaaatttgtcattcatcatggaaggactcatgtccacagtccatgccagcactccataaagaagactgtgaatggcccctcagcgcaactgaggtacaacaaccatggggctctccagaacattgtccctgcttcaccaccctcttgatgtcatcatatttggcaagtttttctaaaaagcaggtcaggtccatgaccgacacatctgtggtggggacatggaaggccatgccagagagcttcccgttcagcttggagatgaccttcctgcaaccttggcagcaccagtagatgcagaggtgataaatctctctctctctctcttcctctctctctgtgtgtgtgtgtgtgtgtgtgtgtgtgcacagaccattggtagtttttaacatttaaattctttcttttcttttctttttttttttttgatgtggagtctcgctctgtggcccaggctggagtgcagtggcatgatcttggctcactgcaacctccacctcctgggttcaagcaattctcttgcctcagcctcctgagtagctgggattacaggcacgcaccaccacagccggctaatttttgtatttttagtagagatggggtttcaccatgttggtcaggctggtcttgaactcttgatcttatgatctgcctgtcttagcctcccaaagtactggcattacaggcgtgaggcaccgcgcccagcctacattctttattttcttgaacaccatgtttgtcaagaattacatggcaccacctcatattatcttatgttataaaagtaacatgattactttgtaaatgtttagtaaaaaaaattaccaatgatgtatatatatatatacacacacactaatatatatatcgcatatatgcaacatatatatgtacacacacacatatatgagtttggggcaaagcaatgggagcaattgctgtgggtgcagaatcagatgaacccttctaagaacttcttcttcatggagcagctctgtcttccatgaggagaaataaaagaaatcccagcttgccaaggaagaagcggacatcaattgcaagggcagggcaagaaagaagagttggcaagggaaacatacatagaacatttgtgctgagtgcaagaggatgagggtcaagggaaagcacaggaacacaaggatcccaagtgccagccttagtgtcatgaatgacttgataaaaaatgatttgaactgttctgttgacaagcatatcgtgagttttctcatctttctttttggggatccatccaaaacccaagaagactcaaactgagtgtgactattggctaatacatagtggagtaagaaattcctcacccactttccttccccttacctatgtaagtcacgtccacataaagttcatccgagaaactgcttcccatctggttagtggcattgaccatcatgatgtatgtcctccacatggaggtgtactgcttgccaaagtggcaggagttggggccaccggttatgtagtctggacattcatgcatgagtgtctctctgcaataagtaatgtattaggaatgaataagaaagtaataaagagagtctagtttttttcttcatagatcaataccactggcctttgggtatcagaaattccaagcgcaaaacccagagctgacaaatggttccttaggcttccatgttctgcccatttcagctgggagtgagagagggaagagcatgttggaaaggttattttagggcctcaagtattcttcttccatcaacccttcctttctataagtgttcttgtgggctcggggacctatattccctgctgataaacactcgagctttcaatggcccaggcaccaccatacccaggtcatgcccattgggttgcctcaggaaattggaactttcacctgtccacacacagaggggtcatgcacaatgcagcagctatttcacatacgtgttgaattacttttcgttttttaaaaaagggttcaagaggacaaaaactgatgttggtccatttcagactgcaccaagtcagcaataaagtgaagtgacgttgagaggaggtatttcaagcccacgtggctcagtaggctgctcacatttagactcaggaacctcagctcaagatacactgcacaggggtggaggcttgttcaattctggttgcatctgagttcctgaaatctgtttacatgatgtccctttggatttcagccgggatgacagttttgtgtacaacaaagtgcagtcattggaaagtgggccagctgtctctaccagcaactaaatattttcctttctgaagaagaatgcagctctcccatgattttcaggagggtctcactgtcagcgtaacaaaatgcttgcacagagatgatctggtttagccctcatttcaaccttaggtcccaatatgtcttctaggagatggtggctcttggatgagcaatgtgctaaggaaaaaacctcaccttcttttccctacaaggttctttattttcttgaacatgaaacaagtttgaaaacctaatataccacatttgtcaaggattgtatggtaccacttcacacgatcctacttattttgcaaaagtgacatgtttagttaaaaaaaatacaaatggcataagaattatagatgagcatttaagattaactagcaattaagaaacacttctatggggcctcaggctgcaacctaagctgtgagaggggatttgaaacattacatcaatattgggtccatttaaccatttgacccttctgctggtgacagaaacagattgatgggacccaagcaagtgatgaagtctcagggtgaggagacctagggtggatgctcagaaatgccaagcatcagcatccagtaacactgatattgtactgctatggctggtaaccttatgtatattgacacagctcttaacagacattaacaggagaatgtgggcatggaccttagactcccctttccccggtggtatgaaccttactggtgtaaattcagggatgtgctgtcactcagaaccagtgtttctttggcctggagaatgggagtactcatgtggggtttcataggagagaagggaacttcttacccttccctgtggtaagtcagtgaataattggtaggaagtcctccatctgtcccaggcctccaccagcaggtgaatgtttccttattgggagaacgacatttaaagatctcaggttttccaggaggtaactgtcctagaaaaagccagaagccactgcatcaatattgaggtccatttaaccatttgacccttctgctggtgacagaaacagattgatggaccaaagccagcgatgaagtctcaggctgaggagacctagggtggatgctcaggaatgccaagcatcagcatccagcaacactcctctgtgggctgccctgatgttggcattgctcttagagagcattttgctggtgtgtgtgtgtgtgtgtgtgtgtgtgtctgtgtactttgagatggagataacaatagcctagtgaccaactgcaaaatttcaacaaagaatgagccttgaatgcaagatagacacatattggttgaagagtgtgtggtggcccttttgtaatcccacaaggtctgtaaagctgataccctccctcagcctaagggaaccatacaaagaatccttcccaggtatgagcaatccgcagacactctggcaaaacaccgctctatggcacttctccactcagctcaccaatctccatctttctgccatccccacacaatgaactcaacttgttcctgatcttctgtccgttcactacatcgctaaagctccctgtatctgggcatcctttccttcctctttccccatcttctcctttccttcccctttcccttcactttttcttgattttttttgggatggagtctcactctatcgcccaggctggagtgcagtggtgcgatcttggctcactgcaacctccacctcctgggttcaagcaattctgcctcagcctcctgagcagctgggattacaggtgcacaccaccacacccggctaagtttttgtatttttagtagaaatggggtttcaccatgttggtcaggctggtcttgaactcctgacctcgtgctctgcccaccttggcctcccaaactgctgggattaaaggcatgagctactgcacctggccacttttccttgattttattcagctttgatcttgtgacccagactcacagtctgtctcctcatccaccccatccccatttctgaatcttggtttttagtccttttttttctcttagattttcctctctttcctttgtgtgtgtgtgtgtgtgtgtgtgtgtgtgtgtgtggtgaggttgcaaagggcttcctttggatacgtagggcttcaagagtgtgtggcccttttgtaatcccatagggtctataaaactataatttgatggatctttttggggtaggaggtgtggtaagaggtaggagagtagccagctcctctcctggttctgagcaaccactgttatctaagagctgtacccagttccagactggatgctagaaggtctcagtgaggtggtgtgaaaatataacaccaagagtgtaaaattttttagttgccaaatccccaaagctcttggcaagcgggctcccatttctcttgcttggatgtcaggttcaaagagggacagcagagccctgggaatttgccctgatactgtggggctgggaagccaccatgctcgcctacatgacttcagctgatcctcttttttgtctagctggatgccctagcattgagtttaggatatcaggagcagagaggagcgctttcagatatgggtcagcacctccgggggttctctctgttttctcctctacccctcatgcaggctccaaggccagagtttctagctgagcaccagagcagaaacagcaggttaggaggagacctcagtgaggagaaatgcgtgggaagaggattctctaggcagagctggccagaaagaggaatttagtggaatggcatgctgtgggacacaggctggagcccaggacaccaggctagtagtgtcagctgaaactcacctaccctcctgctcacaggccctgctaaaacccgtccttgccagcccgggtcagctctgccaatatttgtaacattgctcatcctctaggaacaatttattcaggataatgtgttgctgggagttacagcaagaatgcaagtttttgttttgctttgcttttgtcatgagtggggagaagtgtgtgaagtagaaagaaaagtttatttaaaaagtttaaagcctatggttccataatgagcacactcggaagccaattagggtgatcattgatttcttgagtatttagtttctcttgtgggtcattctgacctctgctttcccctttttctctctctgaaagcttctctttcttattttactgtttattaatagtaccttcaggaagctcaagagaggagggtagatttgtaaaattacaattagacaaatgtttccttcatctgcattagaggaacaagttaacattaatggactttctcaatgcacagaaacacggagaaaaccacacaggaaccacatatacaggtatgtagatgcccacacagagcccgcatcaaaagtacacacaccacacacacacacaaaaatatacacaggtgcatactcatggaagtacatacttgtatgcacacaggtacctgcagagaagtgtgcacatacggatatacacagaacacacacagacatacataaaagtatatacatacaggttcagacagagagacatttgaaatcaggtccatatagaaaagttaatatatacacaggtacatatagaagtctgcacacccagaaatgcacatgggttgacatacagaagtgtatagtcacaggcacccaccctctcatttagctgtggacttcatttctcctgttagcacagataatagagtcggctgtacctgcttcccgccatgtaacagcaacctcttatatcccattatggttttttaaagagttttcatatacattatttcatctgcagtagaggaaacatcactgtcctcactttgagaatttggaaacccagagagttaggtaattggctctaggtcacacagctagaaactggcaggacctggattagaactcaggtcctgtcttcttcagagctgtttcattacactcctgaaatgaggacaaaaggcagagagcacagtgacaagattttgcattaattgcattaatttttctgcattaactttaatgcaaaatattgcaaataatttaacagcagcacataacacagcattttcatttttcataatggcattgcaagaagactgcatggactctccaccctgttgacaaacaccccaggcaatgaaagagagcgtgatagcctcttacttaccattcagaaggcaggtgttgagaaaaagtagcagagtgaaaacggttgcagatgccacattttccttcatgttggctgccttctcttgctgcaggaaatgtatcagaagttcactggaagagaaggtagcaggtaacttttgtgaaatggcagtctggtcaggcacatccaccactttattctgggtatttgcaactgattgttgctccttgcttaatgtgaatgacaaaataggaggaaaggaatgtaggaaaatgtaacagggttggatggcttggcacagaaacatcaattcacacacgctgggaaaatttccaccaccagaggtcctcagatgacaaggtagagagttcaaggggcagcaaggcagtcagttcctttgcacacaccccagagaaaaattgttctctttccaccccatagccacctaacaatatatcatccatcttatgtaacatagattgtatgtcctatgggagaatcctacgagggctcttgctctggtccatcagccaaaaattgtccaggctgaaaagtcagtaccctcagtacaatctcaacataaccatgctgattccaccaaattagggaggctttgaaggttcaagctgagaaggttctggaagtcttctgggttatatgcattaccgcaaagcgaaccacacaatgcactctagtgaacctccacgtggtttctttctcctgtttggaaagccccataaacaaaaggtaataaattctggtaataatttaaattccttgggttcagagtattaagtaaattctgaacctgcaggggttgggagtttggaataatttattattaatactaatattattacccttggaacaacgttcaaagcctctaaatggccttgtaagaaaaaaggatttttaaagacatttggaaaaaaaggctcattagtcttgttggacttcaaacaactgagaaaacaatagatttaatgaactaagtgtaaattcttagaaatgcacggcctaaatttctctttaaatttttattgtttcattttgttgttgttgttgttgttgttgttttaatcaagggaagaacattcaggatcaaagctgccgatcttgggacatttgaaacgtctgagtgtgtttgatgagcccctgaaagaccagcttttgctactgctccttgtgggacgtactcagacatggagaaacgatagcaacagtagaggtttgggcacccaggtaccatcaattagctctttttttttttttttttttttttttttttttttttttgagacagagtctcgctctttcgcccaggctggagtgcagtggcgcgatctgggctcactgcaagctccgcttactggattcacgccattctcctgcctcggcctcccgagtagctgggactacaggagccccccacgatgcccggctaattttttttgtatttttagtagagacggggtttcaccgtgttagccaggatggtctcgctctcctgaactcgtgatccacctgcctcggcctcccaaagtgttgggattacaggcgtgagccaccgtgcccggccaagtagctctttcataatgaggctccagcttcagtaaaggatcccggtccagtggtggatcctgtgaggtgacccgtattttgttcttttggggaccttctacctgctcctacaagattccttccaagcaaatgccctcccagggtgcactttctaaatcacccactgcatctcacccctgagggtcatctaattaaaatcaagtggttaaagactcctactgggtttaaaataatgcctaacacttctggagcatctattatgggcaggcactggggaaagttaagtaccttaatcatgtaaatttcattttgtcatcacaacagccccgtgagcagctacaggttttaacagatgagcaaatggaagtacagagatttagtagattgtcagtcaaatgcccatgggggaaagatacttgggaaacctgagagccactgagagatcatcctgacttgtggaaagtctgtgatgggggtgcaattattccccctctgtgggagagacggtggagacaacagccactgacccacagtgagcaacatcaagccttgggtgagtgtggcattctgagtaggggcaggagagccagagccgagagaggccttctcagctactgccctacttacgcccaaggaccttaaatactgttgatctcatgaatccagcctcattaggtacatatagccccaaatagttctttatcctgctgatctggtgatctcagcctggcttagagatgagagtctatccactggctgaagactttctataatatccctttattgagacttcctttctcttttgggcgttgcactaacatgcttaagatcaacatgctataaatcagaccttcctggtgaggttgggtgctatctagagagctttgtcgaagcagggctccatgcgttttgcaaaagaaactctgggatgggaagcagagtgggtcaggcagcagtagatattagatattgtcatctgcttacatgttctcatgtgctagtacaggatcaaagaaactctcctaaataaagttttcctataataatgtcttcaggaagtattctatgaatgaaaaaaagcttccctttgggatttcctgagacacatcctggaatctagttactattatgcactttctaatgcctaaaacccccatgccagggaattagacatactcacagtggtgtcacggttgtgtttcaacagtgattttccaactcatcctgcattttcttcccaggaaggcaaacataatggaggtaatttaacctttagagaaagacaatcacaacttctcacccctaaaggggctatgctaaatgttaattaactctgaacacacaaggagatgcttctcagcactaggcacatctcttgtttatccaccgacctttttttttctttttatggctggcagacactaagctggggataaattaggtttttgtctctctgagtccaccctgcattgcactcaagatcttgatcgagggcaggcgtggcccttcttattctctcccaattgggactggaatatccaatgaggggcctcatctttttaagatgttatagcagcaaatggctccaaatatttgcagttcagttagcaaaaagtcagccccacacatcctggggactatcatcttaggcatcactcctcagcagctccttggttttgactgagggttaaaaatgcaagtggtggatctgaagagcaggtttatagcaagtttgcagcccccacaccttgcctgtggctagctgccttggtttccttgcttcccaatcttcaaagactctcttacccttaagctcctccccttaccatatgcaaatatgccttcccaccacactgtggcccaccgtggtatgaacgccaagaaaagtcccttctcccttgtgttgcttggcatcaatgctgatcctgtttaggccctctctttccaaaagcctctcttcattctcccttccattaagccaagtctcttccacgtaggccaacagttgagaaaaaggtccagcagcttgtgcttttgagaaactagagccagtctccctacatggaaaatcggggccacactcccatggcctgggctgaccatactatccacattaggaagggaataacataggagaggaggcagtgtggcctcatgagagttaaaaataaaccagatctgagctcccaacataccactccccactgtcaacccctcatcctctgcaataccctctcttagacttcacctttatgttctggcctatgcagtccccaagccaatcctgcctgccagcaatctcagccctaccattctgtggaacttgctcccaagactggtatctggtgatccccctgagtacagtccccaacctgtcctgctgtatctgttgctgcaaccttctactcaggtttttgactcagttttcctaactccagaaatggacctaccattagggtccagaaatggaccctgccatccctgttaggcagggattctgaggttctttttagctcttgcaaactcagttcctggataatcaagcaaggcccaatccaacatttgaactttagactatcatacatatgacatgcacaaattgtaagtacagtcatgtgccacataatgacatttcagttaatgatggaccatatatatgatggtggtcccataagattataatgctgtatgtttactgttctttttctatgtttagatatatttagatacacaaacacttaccattctgtaacaattgcctacagtattcagttctgtgacagctgtataggtttgtagcctgggagcaataggctatgtcatctagcctaggtgtgtagtaggctatacaatctaggtttgtataagtatactctatgatgttggtacaacaatgaaatctcttgacacatttctcagaacttagccctatcatgaagcgacacttatgactgtattctgctcaatgaagtatcacaaaaagaatatatctatgttaccactcaggtcaagagattaaccaccagtagcaccccagaaatccaacttgcaactcctcccaatctctacctactccttcctgatagaaaccattcttcccacttctaacagtacagattaattttacctacctttgaactttatataaataggatcatacaacatgcatttcttgagtgtgtgtgtgtgtggcttctttcatttcacatgggtgtaggattcatccttgttgttacatgtagttttacataattcattttcatttcatctcattcattttcattcatgttatattgaatgaaataccataactcatttattcattctactgtgttgatggacatttgagttgtttccaggttttggcaaactttgggttttgctgagattgatcaaaactcgaatggcagggaagccctgtgcatttcataatcactctgtgctacccgccatatctcctgttaacctaaattaaatttcaagtgctttttttgtcctaaaaaggcaaaaagtctcatttcttgcaaacaaattttgaatacattcatccgttgttttcagtattaggcattgtgttaagggcttccttcggggtccttggcccactgggtttccttacctgccttgttctacctgggttagatggcctgaggctaacataacagggagaaaacctcacatcaggtaccatttgatttccaggagttgggctttttttttttttttttttttgagacggggtcttgttctgttgcccaggctggagtgcagtggcatgatcaccgctcactgcagcctggacctccctgggtcaggtgattctcccacctcagcctcctgagtagtggggactagaggcacgagccaccaacacccagctaatttttgtatattctgcagtgatggggttttgccatgttgcccaggctggtctcaaactcctgagctcaggaaatttacccgccttggcctcccaaaggtctgtgattacaggcatgagccactgcacatggcaagaagttggagttttctttccagtacagaatgccaacacttaatctggaaagtaaaggacataatgtgctcagggcgggaagaggaacagcagggattagatattacataccaggctaaagattaagactgttatacaagctctgcccaatgtcaacagtcaatgattgtgaataaatgaagcccaaaaggtgaagaaaacagaaaaagattctaagacatgggacaaaactctgcatataggaagactggtcccacgctggtatttcaaacactagacttacagccagcatagttttcagtatttgacaggggaatctaaagaagttttaaggagaacatggcagccgctctttcaggaagacattgaaaactgaggatatagtgccaagagaaccctggcctgcaggtggggagatgaaagttccagctgttcttgctctgccaataattagcttcacacaaacatgtgcccacaatgaatgtttatctgcccatagtccaggcagcatatctatgcatttgtctgtgaaagttcacaagaggacacttgctcgtgtggtcattcattattatttttttatcatcaccattatccagtttacattttgctgtttcttgagcaggtttccatcttgtaccctgttttgaggtacccattggggaaaacatccagaactttccatagtgaattacttttatataaaacgtttatcacctggcagtttagtcaggtgaacgtaattagaagtagtttagaggctgctgtaaagtgttcacctctgattccagatattcccctgcccctctcctagaaatcccaaaggttccactgaggaaagaacttcctgaagactctgcactctgtgaagatcatcaagaggagcgcatgtgctgtgcatggtgatggctgcatttggtgagaggtagatgatcagcagagataggatttgtctaaacgagagctgacttagaccttgggccactcaggaatacctgtgaagaaccatctcctggcttctaacctagtcagggcaaattactccaatacgatatatgtgcctttgcactggagtcactttaataacacagaacaccgatgcttccccatggctggaagtattgcttccaaatctaatcacattaactccactcactcactacagcttcctcatcctagcaacatcttttatcccaaggaggcttgttttcgagcagtctttttggcttaaaggcaagaataggaattggatgagtttcaatttcccccagccagtgcacatgtaggacagatggtggaaaacccacgttggcctgattttcagaggaactagtccctcatgagatcatcaatcagttactaacaatcaaaaaacacccataaatcatacattatgttttgcagtttacagagctgttctatagacatcagtggtttctaatccaggattcccattacagtccaaggagtgtcttaaaatttcttttctttactttctttttttttttttgagacagaatcttgttctgacacccaggcaggagtgcagtgacacgatttcagctcactgcagcctctgcctcccaggttcaagtgattcccctgccttagtcaccagagtagctgagattacagatctgcaccatcacgcctggctaatttttgtattttcagtagagacgggctttaccatgttggccaggctggtcttgaactcctggtctcaagtgatctgcccacctcaacctcccaaagtgctgggattacaggcgtgagccactgtgcccggccttaaaatttttcatttctttgttttgtccctggacattctcactaattggctcagaattgagcccacttggaaggacatgggcattttaaaaaaaacctttctagatgattctaaattaaagctggggttgaaaaccactgacttacatgctatcacctgacacgtaaattctctgagtcctctaaggcagccttcctcctgataacagctgactcagcatgctccccatataacacctccaataggaggcaactttatctcacaagcctcccatgttctcagacctgtgtgccaataaaatcagcaaacccttgtatagaatacacttataaatacataaaaacatgtataatatcacacatgaaatgtttatatgtgatccactgcatgccaggcactgttttgttaactcgcttcaccctcacaagaagcctgaggtgtaggtattattattattcctttctaacagatgaggacactgaggcccagagacggtctgcgagttgtccaaggtcacacagctagtgagttgtccaaggtcacacagctagtgagttggatatggaggaagaggaactcaggatttgatctctggggtctgtgctaactatcacactttcaaacgtgcaatgaccctccttcaaggagctccagaagtacaaaatccatgctggctgtgaggagtggggacaggtcagaggaccttggggtcgtagattctgagtcctctaaggcagccctcttcctaataatggctcactcagcatgctcccccaatccaaaggcaggtctgatgctgaaggctgtgggaaccggggagagctcttcaatagcagtaggtattcctggggcatcatgcctgggcaccactgcctacttcagatcatatgtgtcaagatctttggaaaggggggccctaggaaggggatttttaacaagcacttagatgattcttatcacgctcaagttttggagcctgagctcaagctgagaggggcaggaaaggaagatgcagtggaggaggcagagtggcttcctctctacgggaaatgttgtatttagaacttagatagaggcattgggggtgtgatctgttgggttattgtccccaactatttgcttcctcccagccataggattgcatattcctacccactgtcatgggaggtactcgtgcattctgtgagaggagtacatatcccacctcaatcactttggacttggccatgtgaaaagctatggcccatgggatgtgaatggtcgtgatgttttttgccgtgtttaacctgaagcttaaatgcaactggatggtttgtcttaggtctccttgcttttgttctccactgcccttaggatgtcacagatagtgtctatacccttcgtttgggttttaaaatgagaagacaggtggagccccactgagagcccagctgaacccagccaattctagcagagccacagccaatctgctgctgactcacagtccccatgtaaagtgagcggagagtaaatgttgttctaagccacagagatgtcacggttgtttgtttgttactaattgcaaaactaatacagggcaagagtaggaggaggacataagttttgcaagacttcaaacaagattattttttcacagatggagctctgtgtatattatatacgtgtgtgaatgtgctgttcatccaaacacaaaataactttactttgccataaaagtcactactgtattcataacaactttgtctattgttatatattaatatctagaaactcaagctttgaaggtgagaaggaaaattaaaataaaacataaattattggcatactggcactgcttatttgtctcagggggaagggaacatcaggggaatcatacagaatcattacagaatcatgggattttggatctttaaggggcccaaagacttgaaaggtattctaattcaacccctcactttaacacatggggaaactgaggcctggaaaaatgaagtgccttggccaaatgccttgtgggagaatctttggagcttgaggatgggcacaactgagaacactgacaagtctaagaaaaaactctcaagaatgttgctaaatgtattttcccactcttattcctgctttccctaccctctcagaaccttggaatacattcataggaatagtaaaaacatcagatgtccatcagaatttggttttcttttcctttctggccacacagttaaagttacttcattgcttcccctgtcgttagatgaggtcaggtgatgaagtggtggcctctgaaagtgggtagaaataacacacagtaacgcactgaatgacaaactttgcccactgtagactgcatatatggtggtggtcctataagatgacaatggggctgaaaagttcctattgcctagtgatgtcagggccattctaacatcgtaacgtaatgctttacgccgtgtttgtggtgacactggtgtaaacaaatctactgcactgctagtcgtataaaagtagagcgcatacaattatgtgcagtatatatacttgataataactatgttactggtttgtgtatttactatactatactttttattgttattttacagtgtactccttctacttattaaaaaaagttaactgtaaaatagcctcaggcagatccttcaggaggtattccagaaggcattgttgtcatgagctgacagctccgtgcatgctatcatccttgaggaacttcaagtgggacaagatgtggaggtgaaagacagcaatagggacgatccagacactatgtagttctaggctaatgtgaatgtttgtgtcttagtttttaatgaaaaagtttaaaaagtaaaacaaaaaaacttttaaaaatagaaaaaagtttatagtataagcatataaagaaggaaaatgtttctgtacagctgaacaatgtgtttgtgttttaagccaagtattattacaaaatagtcaaggccaggcacggtggttcacgcctgtaatcccggcactttgggaggctgaagcgggcagatcatgaggtcaggagtttgagactagcctggccaacatggtgaaaccccgtctctactaaaactacaaaaaaaattagctgggcctggtggctggcatctgtaatcccagctacttgggaggctggggcaggagaatcatttgaacctgggaggcggagtttgcagtgagccgagatttgcagcgagccattgcactgcagcctgggcgacagggcgagactctgtctcaaaaaaaaaaaaaaaaaaagtcaaaatgagtttaagaaagtttataaagttaagttacagcaagctaaggttaatttattactgaagaaaaaaatttaaaaaaaatttggtgtagcttaagtgtacagtgtatataaagtccacagtagtgtacagtaatgacccagggcttcacattcagtcgccactcattcactgactcacccaaagcaactcccagtcctgcaagctttattcatggtaagtaccctttacaggtgtaccattttaaaaaatcttttatactgtgtttttactatacctttcctatgtttagatacacaaatacttaccattgtgttacaattgcatgtagtattcggtaaagtaaaatgttgtatacgattgtaacctaggagcaataggctatcccatatagcctaggtgtgcagcagattatcccatctaggtttgtgtaagtacactttatgatgttcaagcaacaacaagataacctaaggatgcatttctcaaaaagtatccccattgtcaagcgatgcatgactgtacttctagcctagtcctggtctttaaagctttttacatattcccccctctatttctctctcctccattactggcctgaagaagatgaaattgaggactgtgaggtcctaaaagctcagtacagccaacagatgaaaggctcttgagttcatgctgaccaccagcaaactgtcacatgggtgagaaataaacctttggctgttgtgctctgagctaagaggctgggtgttataatggctagctttatttagttgggcaaatctagggacaatccagagacaaccagtacagcctactgcagatggtaactactacatttaaccaagtagaagagcagtgattaagacggaagcctccaacgcctgacccactgccattgtcccgtctggaataccatcatcaaagttccagaacaatctcagtttggcttcatctacatattcagccccctacactgtcacctgtaaacatgtctacaggtgttcaacaacacctgttgggtgactatttttataaagtcatatagaatgcagtattctcatgtacagatccacggaaacagcacttggccttgagttgtgcaactcttttccattaatcaacaggctctccatattcctaagggataggttctgagaccttcttgattcctccagtaacctctttgtgtgcattaatttgaactcaagggcagatggatgatgaagcccactgagatgtggctgcaaggtggttgggttagtagctgaagtgaataaaaatcgcaatatcagaaatcaaggaaatgtggagacttcaagaactgggacaacctccattgtgaaatcttcaactagcaaggcaataataattctcagcccattcttccttttccttcataaatgcacacaattaaaacatatttttctggcatcatcatgtctaaatatctaaagcacaccctttcaggaatgaaaacacatatatatataaaaacatacatatataaatataaaacatatataaaacatatatataacatatatacatataaaacataaatataccttataaaacatatatataacttataaataacatatatatgttttatatattatatatatatatatttttgagatggactcttgctctgtcacccaggctggagtacagtggcgcaatctcggctttctgtaacctttgcctcccaggttcaaatgattctcctgcctcaatctctggagtagctgggattacaggtgcgtgccaccatgcccagctaatttttttgtttttttagtagagacagggtttcaccctgttggccggggtggtctccatctcttgacctcgtgatctacccgcctcggcctcccaaagtgccgtgattacagacgtgagccaccacgcccggccaaacttttaatctattgggtgcacacttctaaaaatgaggcgcttctctgatttcctaattgaaactttttatggagtactggggtcatttatgaacataaaaattatggtgtgatatggtggatataggatgtgctcagctgctcctagagatcaaggcttgttgccaaaatcaaatgcctaggacttgagcattttaagattctgagtcttctttttatagcctccttccctcgctccatccttttgcccatctctcctctctcctttcctttttagtgtctttttctctttctttttccttttcttttctttgcttttctttcctttcctgtcccatcccgtcccgtcccgtcccgtctcctctccactcctctcctctcctctcctctcctctcctctcctctcctctcctctcttttcttttctttctttgacggagtcttgctctgttgcccaggctggagtgcagtggcccaatcttggctcactgcaacctccaatgcccgggttcaagaaattctcctgtcttagcctcccgagtagctgggactacaggcacacactaccatgctcagctaatttttgtgtttttagtagagatggggtttcaccatattggtcaggctggtctcgaactcctgacctcaggtgatccacctgcctcggcctcccaaagtgctgggattacaggcgtgagctgccacgcccggcttttttcttttttaatgtctttttctttacattcaatttaacagctaatagttctcacttttgttagctgactcccttctagatcactcaagatagtttcttctagccccttccactctattgttgcttctgatctgatgtgaattaaaaaacccaataactaaattttagaaaattaaggtggtttcaaataagaataactaggttctgagtgatgactgaaggaatttcctaccaaacctgtaggtaaatagattttgttatatctattttgctcaaaaacctatttaccttgcttcctggatctcatatatgttccagatagttaaggttgctggataggtgagttttaaatagtgatgcatttctgtgtcccaaagtaagactactgaacttagaaaaatatggtatagtatgtttaacattttaaaaggtaagcgctattgtcaattataaaaggctctctctttttcttaataagtcctccataccactagtgcatatcagcaaagggtacagctaactccccgttggttgctaggcttcctgggccaatggaagtagagtgggcttctgcaaatgtctgcacatttggccactagaatattggcttggcagatcccagtaaatcttcattgactcactgctttacaataaaaagagcatcactttgtacagcatataatcaatgatgtgtcttccaaacattcctctctgaaatcattaatgtttaaaaaaagagattgggaagtcaaaactcaaaatgttagtcaatttctttttatctgtgtaaacactcttcttagtagtttacccatgatggtttttcatccttggcctagaaaacatcctattgtcacatatccatgcctctacactcagtttgggagacagaaattaatattaccataagaacaatagaatttggaagggaagtttgatgctttgccaatgctctcaattatagcaattgccagtttatttgcaagtcaaaatataaatggcttgggatgctttcatgggtgtgcctaagcagaaggcctgacaaacatctgaatgtgtttttgaatgtctttgattgcctaaaagatcctattataatattttccttttttttttaaagctgtgtaagtgcatgtgcccaggcgaacagagcccaagtaaggctagtgggtcagtatggggagagcagtagattgtgttcacttttatatcccgtacagttcaaaagaggggttccctgcttagcacaaacgttctgagaacacagtagcacttagctccttacagaatgaaggatgagtaaccaggcagggctgcctctaaatggcagccttcactctcaccctccgtccacatgtagggcacactgaactgtatgtcacttgaggtattaataagagcaaggataggggttccaagacggccaaataggaacagctccagtccacagctcccagcgtgagcaatgcagaagacgggtgatttctgcatttccaactgaggtaccgggttcatctcactggggcttgttggacagtgggtgcagcccacggagtgtcagtggaagtaggggggtgcatcgcctcacccgggaagtgtaaggggtcgggaaattccctttactagccaagggaagccgtgacagacagtacctggaaaatcgggacactccaactctaatactgcacttttccaatggtcttagcaaatggcacactaggagattatatcctgcccctgactcggagggtcctatgcccacggagcctcgctcactgctagcacagcagtctgagatcgaactgcaaggtggcagcaagggtggggaaggggcgtccaccattgctgaggcttgactaggtaaacaaagaggccaggaagctcgaactgggtggagcccactgagctcaaggacgcctgcctgtctctggatactccaccactgggggcagggcatagtggaaaaaaaggcagcagaaacttctgcagacttaaatgtacctgtctgacagctttgaagaaagtagtggttctcccaccgcggaatttgagatcggagaacagacagactgcctcctcaagtgggtccctgacccccgagtagcctaactaggagacacttcccagtaggggccgactgacacctcatacacgcaggtgcccctctgagacgaagtttccagaggaaggctcaggcagcaacatttgctgttctgcaatatttgctgttctgcagcctctgctggtgatactcaggcaaacaggttctggagtggacctccagcaaactccaacagacctgcagctgagggtcctgactgttagaaggaaaaactaacaaacagaaagacattcacaccaaaaccgcatctgtacatcaccatcatcaaagaccaaaggtagataaaaccacaaagatggggagaaaccagagcagaaaagctgaaaattctaaaaatcagagtgcctcttctcctccaaaggaatgcagctcctcgccagcaatggaacaaagatggacagagaatgatgttgacgagttgacagaagtaggcttcagatgattggcaataacaaacttctctgagctaaaggagggtgttcaaacccatcgcaaagaagctaaaaaccttgaaaaagattagatgaatggctaactagaataaacagtgtatagagaagaccttaaatgacctgatgaagctgaaaaccatggcacgagaactatatgacgcatgcacaagcttcagtagctgatttgatcaagtggaagaaagggtatcagtgactgaagatcaaatgaatgaaatgaagtgagaagagaagtttagagaaaaaaagagtaaaaagaaacaaagcctccaagaaatacgggactatgtgaaaagaccaaatctatgtctgattggtgtacctgaaagtaacaaggagaatggaaccaagttggaaaacactctgcaggatattatccaggagtacttccccaacctagcaaggcaggccaacattcaaattcaggaaatacagagaacgccacaaagatactcctcgagaagagcaactccaagacacataattgtcagattcaccaaagttgaaatgaaggaaaaaatgttacgggcagccagagagaaaggttgggttacccacaaagggaagcccatcagactaacagtggatctcttggcagaaactctgcaagccagaagagagtgggggccaatattcaacattcttaaagaaaagaattttcaacccagaatttcatatccagccaaactaagcttcataagtgaaggagaaataaaatcctttacagacaagcaagtgctgagagattttgtcaccaccaggcctgccttacaagagctcctgaaggaagcactaaacatgggaaggaacaactggtaccagccactgcaaaaacatgccaaattgtaaagaccatcaaggctaggaagaaactgcatcaactaataagcaaaataaccagctagcatcataatgacaggaccaaattcacacataacaatattaaccttaaatgtaaatgggctaaatgctccaattaaaagacacaggctggcaaattggataaagagtcaagacccatcagtgtgctgtattcaggagacccacttctcatgcagagacacacataggctcaaaataaagggatggaggaagatctaccaagcaaatggaaaacaaagaaaagcaggagttgtaatcctactctctgagaaaacagacttgaaaccaacaaagatcaaaagagacaaagaaggccattacataatggtaaagggatcaattcaacaagaagagctactatcctaaatatacatgcacccaatacaggagcacccagattcataaagcaagtccttagagacctgcaaggagacttatactcccacataataataatgggggactttaacaccccattgtcaacattagacagatcgatgacacagaaagttaacaaggatattcagaacttgaactcagctctgcaccaagtggacctaatagacatttacagaactctccaccccaaatcaacagaatatacattcttctcagcaccacatcgcacttattccaaaattgaccacatagttggaagtaaagctctcctcagcaaatgtaaaagaacagaaattataacaaactgtctctcagaccacagtgcaatcaaattagaacccaggattaagaaactcactcaaaaccacacaactacatggaaactgaacaacctgctcctgaatgactactgggtaaataagtaaatgaaggcagaaagaaagatgttctttgaaaccaatgagaacaaagacactacataccagaatctctgggacacatttaaagcagtgtgtagagggaaatttatagcactaaatgcccacaagagaaagcaggaaagatctaaaatcgacaccctaacatcacaattagaagaactagagaagcaagagcaaacacattcaaaagctagcagaaggcaagaaataactaagatcagagcagaactgaaggagatagaaacacaaaaagctcttcaaaaaattagtgaatctaggagctggttttctgaaaagatcaacaaaattgatagaccactagcaagactaataaagaagaaaagagggaaaaatcaaatagatgcaataaaaaatgataaagggatatcaccaccaatcccacagaaatacaaactaccatcagaaaatactataaaaacctctatgcaaataaactagaaaatctagaagaaatggataaattcctggtaacacacaccctcccaagactcaaccaggaagaagtcgaatccctgaatagaccaataacaggctctgaaatcgaggcaataattaatagcctaccaagcaaaaaaagtccaggagcagacggattcacagccgagtctaccagaggtgcaaagaagagctgataccattccttctaaactattccaatcaatagaaaaagagggaatcctccctaactcatttcatgaggccagcatcatcctgataccaaatcctggcagagacacacacaaaaaagagaattttagaccaatatccttgatgaacatcgatgcaaaaatcttcaataaaacactggcaaactgaatccagcagcacatcaaaaagcttatccaccacaatcaagttggcttcatccctgggatgcaaggctggtccaacatacacaaatcaataaacgtaatccagcatataaacagaaccaacaacaaaaaccacatgattatctcaatagatgcagaaaagccttcaacaaaattcaacaccccttcatgctaaaaactctcaataaactaggtattgatgaaacatatctcaaaaaaagaagagctatttatgacaaacccacagccaatatcatactgaatgggcaaaaactggaagcattccctttgaaaactggcacaagacagggatgccctctctcaccactcctattcaacatagtattggaagttctggccagggcaatcaggcaggagaaagaaataaagggtattcaattaggaaaagaggaagtcaaattgtccctctttgcagatgacatgattgcacctttagaaaaccccatcgtctcagcccaaaagctgataagcaacttcagcaaagtctcaggatacaaaatcaatgtgcaaaaatcacaagcattcctatacaccaataagagataaacagaaagccaaatcatgagtgaactcccattcacaattgcttcaaagagaataaaatatctaggaatccaacttacaagggatgtgaaggacatcttcaaggagaactacaaaccactgctccatgaaataaaagaggacataaacaaatggaagaacatgccatgctcatagataggaataatcaacatcataaaaatggccatactgcccaaagtaatttctagattcaatgccatccccatcaagctaccaatgactttcttcacagaattggaaaaaactactttaaagttcataaggaaccaaaaaaagatcccacattgccaagacaatcctaagccaaaagaacaaagctggaggcatcatgctgcctgacttcaaactatactacaaggctacagtaaccaaaacagcatggtactagtaccaaaacagaaatacagaccaatggaacagaacagagccctcataaataataccacgcatctataaccatctgatctttgacaaacctgacaaaaacaagaaatggggaaaggattctctatttaataaatggtgctgggaaaactggctagccatatgtagaaagttgaaactggatcccttccttacaccttacacaaaaattaactcaagatggattaaagacttaaatgttagacctaaaaccataaaaaccctagaagaaaatctaggcaataccattcaggatataggcatgggcaaggacttcatgactaacacaccaaaagcaacggcaacaaaagccaaaattgacaaatgggatctaattaaactaaagaacttctgcccagcaaaagaaatcaccatcagagcgaactggcaacctacagaatgggagaaaatttttacaatctacccatctgacaaagggctaatattcagaatctacaaagaacttacaaatttacaagaaaaaaatcaaacaaccccatcaaaaagttggtgaaggatatgaacagacacttctcaaaagaagacatttatgcagccaacagacacatgaaaaaatgctcatcatcactggccatcagagaaatgcaaatcaaaaccacaatgagataccatctcacacccgttagaatggcaatcattaaaaagccaggaaacaacaggtgctggagaggatgtggagaaataggaacacttttacactattggtgggactgtaaactagttcaaccattgtggaagacagcgtggcgattcctcaaggatctagaactggaaataccgtttgacccagccatcccattactgcatatatacccaagggattataaatgatgctgctataaagacacatgcacacatatgtttattgcggcactattcacaatagcaaaggcttggagccaacccaaatgtccatcagtgatagactggattaagaaaatgtggcacatatacaccatggaatactatgcagccataaaaatggatgagttcatgtcctttgtagggacatggatgaagctggaaaccatcactctgagcaaactatcacaaggacagaaaaccaaacaccgcatgttctcactcacagatgggatttgaacaatgagaacagttggacacagggtggggaacaacacacaccagggcctgtcattggatggggggagggggtgatagcattaggagatatacctaatgtaaatgatgggttaatgggtgcagcacaccaacatggcacatgtatacatatgtaacaaacctgcatgttgtgcacatgtaccctaaaacttaaagtataataaaaaaaaataagagcaaggatattgtgagtagacaggagtgaggggctctatagaacatttcatagcagacacttggcaaaattccttattaagcatctttgtatttgccctcaaagttcctcccctatcagttgtcatatcttgccccttcatctttcctcacaccgctctaaaatcccctctaaaataaaataaaattctctctatagtcccaagcaatcctgcaatcagcatcagcttgcatatctcactcaccaagagcaggctcatttctagagacatggtaaccatctagtgttcctcaaagtcaaccccatggggaatcttagccttcccaccatgtggcctgttaatgtctttttcccacaaaaattgctgtctttctatgcaggaatatagctgccaggaaaatgtgatttctccatactgtttcagaaacaataggaattgccacattgtcccccaacagaaagctgggctgcttctcatgctaactttcagattaccctctttcaggcatggacatccctgggttctccaaagctggatcatgccctgtctacaaaacacccagaacctgaccttaccgtggcactgataatgaatcttgacctatctttctctgtacccccaccccatcccaggctagtagctcattgctgtgtgtgtgtgtttctttcatatctcccatgcttaatgcaaaactggaaacatagaaggtattcaataaatggttctgaataaatgaaatatatgtggtgtagttgtatttagagggcaactggtaagaattttatgctctaaagagctgttaatcattggaatatgtgattgagggaggtaatgccttttccatcttggatggtttaaaaattgataataatggcaacatatattttaatacaattttagttttcaaagtattttcatataaaatattttatttaattctcttcccaaccccgtgagatttctggatggtaacactgagtttgtaaacacttctggctgctagatggtagaggtgggacagatgttttatcttttgaatataaattggtgtatccttttagggtaatatattttaaaagccgtaagaatgtagatacactttgaatcacaaaataggcttctagaaatttatcccaaatgaacagaaacaaaaacaattctgtacaaagagaaccctaccctcctacttctagaatccaatattctgctttcattttggtatttataaaaacagaatcatggggaagagatctaaatatcaaaccataagggattgtttacctagatcgtgttacagtcatataatgaaatattatttaacctttaaagtaatgtgataaaccaatgatatagaaacatggaaaaagtaaaaaagaaattgaatacagaaagtagatgtttttgatcccaatctaatatacatatctctatatgtgcacagaagaaagactggaaatatatattgggagtagttgtttctgggaggatgattctaaaataaaatgtgattacttttgtaataaaataaaaagctattactatcgtaatcgaggaggaaaatcccaacaaaaaattttaacaccacaaaacaactcccaaatgaaaacctggcattcagtggtgcaaatacatggaaaagctcccctctaggttagaagatagaaattacttgtatgtttgtggcaaaattttcagcagttgctgacagccgacctccctgtgttaatcagggtgaatggctgagcctgtgccctgcttcttagcctgtgttgaatgatttaaaatgcttttgatactcatggcttgcccacttgttttcccctacttctctgaattccatcactgtgtctgtcttagggttatttgaaatacctaaggctggccattattttttgttaaacttctgataagtgggtaaaaggcaatttcattgaaaaactcatttttcagagcctcaaagaagggctgggtcatcttattaaaaaggcgtttaataaattcagtagggctctctctgagaagctgggtgcttgttttactctggccccggggcttctgctagtccttgtcatgcaaagcaagaggaaccggaaattgaaagagtggtaaaccgggaaagagggtagagaaagaggagaaagcaggaggatgtggaaattcaaaggcaggtgggctaggggagggaaagcactgggctcaaggtgaaaactccacttctttgcctattgccaggggtttgagcatccctaccacctcctgacattactaccagtcccaaagtccctctctccctcatgactttggtccatcttgtaccaatacagcctgtgtctacctgatttagtcacctctcatgaacaatatggtctttcagacttgcttcattcaaaacatctgggctatttatctagcaagataattgcttgtctctcttactggcttatattcattctttttttccccattttattcagcttccctcaggagccctttctttgcagaaaagtcatctgtccaaccagagtattaatagtcagggcccttagcgaggctggtctgggagtggggcaattcatactcccagagcaacttgtggggaagagggagggaaaccacgatccagctctttacaatgcattttgagaaaatgtagagttgacctatgtagtggctggaacatccatccacccacccatccatccatcaacctacccacccatctttccatcaatccatcaacccgcccacccatttatccacccacccatttatccatccatctatccatccatccctccatccacccacccatctatccatccatccatccattaacctacccacccatctttccatccatctatcaaccacccacccatttatccacccacccatttatccatccatccatccatccatccacccacccatctatgcatccatccatccattaacccacccacccacctttccatccatctatcaacctacccacccatttatccatccatccatccatccatccatccatccatccatccatccacccatccatccacccacccacccacctatccatccatccatccatccatccatccatccatccatccacccacccacctatctatccacccatccatttatctatccatccatccatccatccatccattcatcaatctaccacccacccatctgttaatccttcaacaaatatcaactgagcatctgtgatgcaggggtagggtcctaagaatacaatgttttgctgaaacaaacctcctagtacttccagtctcctgaagagaggagctaataaaacagttcaatgtaaatgatgcaagtgctaaggaggacccctgcaggtaccatgagaacccatagcgggcagatttgacctggcctaggaggccaggaggggttgcctggggaggctgcttcgggagaaggaggagtagaaagcccctcttctttatcatagccctgagtatagctgggtctggcagacactgctggttgcttctccaacacccacttctgccttcatttttgttaggtatctagttttgttaggtatcaggcatctagccccaggggatgaggaggtatcagtctaagctaaccatggtgatctcacttgccttttgcctgtgattggtttaggaatgttcttgacattgaggcctagcagaagtcttcaagggctcggttgtcagcttggagttggatgtgaactgactttgcagcatgatccatgggtaggcacacactttggagctgacacatttagggacttggacaggtaccaagtaaccccatcgcttgagagagacagaataggtggttgttttctagagctggtcctgtcattcatcagccacattgaatttggcatgtcttttcctctttctgagcatgagtatcttttaatgtaaagtgtcgagagggtcacatgtgccctgctttcctcagtcaactgttgtgaggatgaaataaatgatatttttgttcaagcatgccacatggctgcaaagtgctattgaagcgtgaaccactgtcattggcaaggcttgataaatgctccaccatcatcagttggggttacaattgctccttggaaccctccaggctcctcagatttttctgagtggaggcctaatttcagatggacaagatgctcctcttccttgaaatgtcttttgacttggaaactcattgctctaagtgggctccgggagactgcctggctccttgtgtcactagggtggagatttccctttgtgtgggagcccagtggctcccgtatgtgagtgaaactctgagtccctcttgcctcaggattcaggatggggtcttttgcttcatcagaagcccacagaactcagaggccatccaatggaggaaatgggctacaaagccgaccccagtggctcctctctttccatttgttaacataaagagtttgggtgcggcagatgcatgtttgctcagggctgggcctgagctttggctcccttcccttttggaattcggttccttctactcttctctatccctgcccacagagctggtgatgttgggctgcacctcttttccagaactctctgctggaagtaccagcctcagtctcaagacatggtattcagtagaactttcaatcacgatagaaatgtccaatggatttcctttgtccagtggtggtagccacaagccacatgaggctggcaaacatttgaaatgtactcaatgtgactgaggcatgaaatttttaatatcatttaatttcaatttatttatatttaaattgctacaagtagctactgtatcagacagtacaggtctagagctcaatatcccaatcgtttcagtctctccactgcaatcaaaattaatttgtcctgtgtcccaatcccaaggctctcttcttagagaagcaccagcaagacaatctcataaacaaattgctgtctataaattaaggcctttctcccttaggtacatgtgtaggttttgagtaatgccacaatttagtcaaagcagaaactcaaatgataggaatttgagaaactctaacaggtaagtggtggggaaaaatattataagtatagagctttaaatgaacttcaaaacacagcctatgggtggacacatcctcccgaggaccctgggctgcttctaatctcctcttggcttcttgcagtctggagagagttaagggcagaagtgtgcggatgggggcctgggaaagggctggaggtgggagggttggaatgggcagagcctgaaggatgccagggctcttgcaaaagaatctggtatgccaggcaaagacagtttgttccaccctgggtgggtatggggcacgagggagtgattgttagggagtgatgattaccactgggacaggactggaaagttaacaattaagttagagagaccagacatcatataaaaggctgcaaaatggactgcggcactttgggtcaagtcttggacaggaattgcaattttactcttaacttttaatcccctcttttaaggagggtccccccctctgaattcttctatgaatattgctttctggatgttcttttcaccctgaaactgagctgtgtttctgtttctcttggatgaccatgcaactgctttcaagttcctgcctgtgatttcacagatagccactggaatcagaagtatctttgtaatccaaacaccaggttgggaaagggtggaggatgatggaggctgggtgcaggggtcagggaagatcaatcagaggaataaaaggtccatgaggtgcacttaaagatgaataggaagtgtgtgtacaaaccctagggctttggaatttccttttagggccttggtttgccaattggtaccacagataaatctgctactgccaccttatctactttatactatttggttaattttttttaaaaaaggatttctggttaagccactctttagagtggtgacctgtttgctgtaaaaagttaaaattatataaagtgaagtggagaatatgtctcaaatcttttgagcaataatgttgtctatgaatacatgtctatgaataatgaatacacacacaaatacaaagtagcggccaaattttccgggagctttgcaacacagctctgactactgggtgctttctgacctcttcaaactcttaaaggaaaggtccactcagtactcagcattgccctgttctccttcatttgcctttccttccagtaaatagcatgaggcatttggcatgaaggggtagaagccaagacgggagaaagcacagagaagtctgaatgggtcgattcaccacttccaatgttaccagatgctcctgggcagggctattatgctgtggggcactcttgtacccagagcgttttgatgactgatgacacttcttctgcaagtatttgctaatgttattgtgaacactataaatttcagtcgatttccatgaaaaacaaaagcttctgctgggctgaggcaacttaaagcagtggtttttggtaggataattttgtccccacctggaagacatttggcaaagcctggaaacattattttattgttacttctgttggggggagttttgtcctccttggaactgtctggagatgtcattggttgttagagctggggtggggtggtgtccttctggtatttagtgggagacaccaggaatgctgctgagcatcaaatgatgcacagaggagccccaccacccaaaacgatccgacccagaatgcctacactgttgtttgagaaaccctggcccagagggcaagttcaggctcagaacttgacaccaaagcggcatgatggctctcaaggggctatcatgtttcaatgtgggaagactagtaagtttccctagatggccccaagaagtcccaggaaaattttgtctaggattttcttcaaccaataacttcattgttttcctatcttcctggctccttaacttcctctgaatgagagagtacagcctcaaagtcgtacatgtcgagctcatctcagtgggtccagatcccatttgcctgtagtgtagacagagggaagtcagggggcttggtttctccatctgtaaaatggagtcgtaatacttcatgatctatttgctaagcagtcctggcagcctagggtttccttgccactggcagatgagagaagacccagagcctgtcacacatgagtcctgccatgagggctgggaggaaggagacacagcagtaacattacggggcccagaaagttgtggcaagaatttatgtagagttgcttaagaaaataaaagcaagcacaatatttctctctctgattatagaagtaacatagtcattgtcgataatctctcaattacagaaaactacaaggagaaaataaaaatctctcatgattgcaccactaggagatatcagctattaaaagctttggtattttctttgagaaaaacagaaaaggatgaacatcagtttttctgagctggacaggctggggagactgaaacagcctttgaagacagcagaatgtgccagtgtagacattgactggtttgagatgatattctgtaaaccaagatagttgagcccctgccctggatgaaacggacagtggggcagatgggtggtgtgaccgaggggcatgagaacaagtcccccttaccttcagggttcatgtggaaagcatcctcagtgttcgcctccatgaataggagagttctttagctgaaagaggaaatgattcattttagctccaagatgacaaaacgggagattccatttctggctcactctgcagtacgtagcatggctgaacattggcccctcagtgataggcatgagacagctctagtgttctggaatttgttttttggcagctttattttgaagtaattttaatcttacagaaaagttataaaatagtaaaaaaaaaaaaaaaatctcatataccctcgacccacatacctcaattgttactattttaccacatctgatttataatctttcttctctgtatataaaagttacttcctaattatttgtgaactagtcacagtcatgatgcatgtttacccctaaatatttcagtgtgttttcctaagaacaaggacaattctcctacataaatgtagtacaataattaacgtaggaaaattaacatcgacacagtattattacctaatctatagagcttactcaaattttgccagttatcctagttgggattagatttcataaaatttggtcctggagactttaatgaaatttcttaacaaattctgacatagttatagatgaactggaattctgggttttgtataagaactttcagactctggggactgactagcctgagtctcggaggcatgaagggacaactgttagaggtatggatcttttttttttttgacagggtcttactgtgtctcccaggctggagtgcaacggcgcaatcacagctcactgcaacttcaacctccccaggctcaggtgattctcccatttcacccgccccctgccccaagtagctgggactacaggcacatgtcattacacctggcgaagtttttgtatttttagtagagatggggttttgccatgttggccaggctggtctcaaactcctggcgtcaatgatctgcctgcctcgtactcccaaagtgctgggattataggtgtgaaccaccatgcccaacctacagctactttttaaaatgggcttcgatatatatgaacagcaattcataatttaatgtccagttttgtcttgcccattccaagcaaaggcaaataatctaaccagagtagcagacaaaataatgctttttctaagtcttcaaaatccagaatcttcaggattattccttgaggaagccagtgctgaatatcctccatgctgactcaatggacagaggaggaggtgactggcaggaagctgtggttggccactagcaccctcatgccattgacaacctctctctctctctctcacacacacacacacacacacacacacaccactttctcaacattgctgctgttggcatgatcaatcaagagcctggaagtctttacaatcagaggctaccatgtgacaagggccatctgagcataagacagccagccccaaggcatttgataataaggggtctgttggatccagagcctctgacacagatgtctggggcacgtttcttaggagccactcatttttctccatagggtgcagtgacaccaaattttctgtttaaaaaaattttagattctaagaattattttagaacttaaagttctctctttgattagagttgtcctgttctgttcagagcaaatcctgctccgttctgtcatctccaaaataagatccagactgtttttacactcttggcagaaacactgaggggtcagcgagggagtggagaaccaggacaagggctgtgctgggggtgggacatctggaacagcagatagcagcagtgagggcttcggggcaggcgggcataaagggatggcttctgcagttcaacaaacacttattgagtgacaggccctgggcccacttggtccattcatctactattcattcagcatttaggaaatgcttggcttaccacttagcccttgtcatcctctgccctggctcccacgtctattctttacctgctctgtgccctgtgagtctgactcctgtgccctccagcttcaagtagggttctacccacagtgggtagagcatggagatgggcatatcagggtatcgatttccctccctccctgactgcctcagagagtggtgctagccgtggttgtgtatcttttaccacaagactagttaagcagtcatgactccagctatcactgggccctggcaaaattcttccctctccactcttctttatgcagataggggggtgacaaattcccttgttcttctaaccctacccctgggcatgtaaagagtctctacattctcttcaaaatcctagctgcgcgtgccatcctttttctgtctgaccctaagatggcccttgaatatgtgctaaattgtgcctgattgctctggacaagcaagaaaggtgtaaaattttgtatatacttcctaacatgaggatataccattatggggtggggtcccaacatgaggatataccattatggggtggggagacataatttaatagaagctcctgggggaaataactcacagatttcatcttttatatacttgagtattgtgtgtcagtcaaagaccaacctgatctctggtcacattatttgaagtatggcatccagaacaggggaggtgatagtactacttagttctgtgaattctacattagctcccacttggagtactgtgctcatttccctgctcctcactttaggaaaaagcatgttgtttatctccaaattctgtcacataaagcagaagttgagagagtttttcttcaagagccaaatagtaaatattttcagctttgtaggctgaaatgttccaagtactctgttactgtagtacaaaagcagccgtagacaacatgtacatgaataagcttggctgtgttccaataaaactttatttatataaataaacaggctggatctggcctgcaggcattactttgctgacctctgatagaagagtgcaaaatgaatttattctagaggtgcccagaaggcagaagtttgatcaatgtgtaaaaaccatgggggggtagatttgtgctaattttaagatcattctagtggtgactactgttcccaaagagaatcatctgtttcataagtcagtgagtttcttgtcattataggggttcaaagcaaaggctgagtgttttagaagaattttctgcagagcatggagagtaagttggatgatgtgggaggtaacactgcctcacatttctgtatcttcagcatggtacagtgcacacatagtaaatcttctcagttctacgttcctagagggaaggggctgtgtcatatccatccttgcatcccaccccctcctgaaagcctagtatagtgctttaaatatggtgggtgtgaccaatacattttttttgtcagcctgactctttaaatcaaatcttgctgacagactaattgtactaatttgtctttagtacaatcatcactaccagccatattaaataattcaattacctctgataagcttcaacatttgaggactttcaccgaaaataatacacaacatttactaagttcttaaaatatgccagctatcatgctaagaaccttacaggcattatcttatttaatgctccccaaaatctatgaggtaggcactattattacccctactttattgatgaagaaactgaaattcagagaagactcatagctaagaagttgcatatccaaaacttgaaccgagatctctttgatgccaaaggctgtgctccaaccacaattccattctgcttctgggtcattcatttattctttcattcactcagtattcaaccaataacaattggttgcctactatttgccaaatagtattttaggtgctgatgatagagctgtggatataaacaggtcaagtccatgctctgaagaaacttacattctgggtggaataaagtgggagttgatacacaattaacaaatgagaaaataatacatggtaattcatcacaagacatgaggagattaaaaagacaataaatatttcttgtcacactagaatcacagatatcatcctaattgatgaatttagcaagacatggagattaaaaagataataaatacttcttgtccacaccagaaccacaggtataaacctaattgatgaatttactgaagttctttcttgtttttttttcttcaacttttaagtcctggggtacatgctcagggtgtgcaggtttgttacataggtaaacatgtgccatggtggtttgcgcacagatcaacccatcacccaggtattaagcccaacatccattagctattcttcccgatgctctccctccccacgccctgataggccccaatatgtgttgttcccccaacctcctgccctatgtgtccatgtgttctcatcgttcagctcccacttataagtgagaacatgcggtgtttggttttctgttcctgagctctttcttgtttactgacattagcccaaggttagtcttttgtcctgacaaattgtcagataaactgacgttaggccaatgttagtctttagtcctgacaaattgtcagataaactcagattcagaaagaaatctgcaagatttctggcaattgatagagattacatatggcaatttatagacatgcatgtggagctcttgaatgaaaaggaagtttatccaataaagcacttgggaatcactcttttggggcaggctgaacttgagcagaagcaagcacatccacttgagtcaaaggcatgggccttgtttaggagtagaggtaccagggtggctgagagtggaggaaccaaaggggaattacaaaatcttgattgagattgagatggagacagagggagcaagataaatagggtaaagtcaagtcaactgtcaggtccaattggcaagtgttgactgggaatgggagacagtgcccaaaggtcaggggtggagtaaacacaagcccagatgaggaagcgaaagaatccaatattttgtttgtgtcttgatgggtgccaactacaaggggtaggtgtgggtggcctagttacaggtgaaggataggaattgacaaatagtagtaatccttttgcaattccagaattcctttcgttagtggattgtaaagtgattttcagagtagagactcctgacagcatcagcataatcttacttttaaaaatggctaaaaaacagaaagacagcaattagttaacatttattggctgccagacattgtttctaaacactttaatgctttatttcatttaatcttcataagtacactttgagaaccaagcttcttaatagggagctaattaaagaatgactaaaaacataagtgacatttggagggaacttgtataatgtcatcattgaaaatgagtcctagttattcatgtactgatttgtccactcacatatttattcagcctataataattgggcacctaatacatgttgggtgctattctagggcctttgcctggatgatgttattgatttcattgtttaacagagagacagtggagggagcaagggattttgagtcagaaaatctaagttctgtttctaactctaactggtcccgtggtccttggaaaagtcaggctgcttctctctttaatgtgttctgatgtaaaacaaggagctaagctgcttgaggtcttttagaatttactgttaaagtattcagtagctttatagtacattgacgcttataataaatactcacttatagtctgtcattctaccctcccacccccatcagggaaatcatagtatttatgaggctttaaacgtggaaacttgtcagggattggaccaagttcctctgctcttttcactgaattcctctgccttccatgtaggaatttgtgtttaatttctgaaagaattataacagagctgggggaagatgtcagaggaaaagggaaagatatagatgatatagaagacaaggagaagttaagactgggaaggacaatgtactagctctcaggagctttgtgctctgtctctgaaatcattcagggctgctatagtcatcaaaaaaatgtatccaaaggcacaagaagagagaccttccaactggtggaaattacattaaggcaaatttgggttcagtaaaatggtagaggagttctttaccggacattccgattgcccatggctgggcagagctaaaacaaatgggtcatattacaaggcaaagtagctttttaattttaaggcccaccagtcaatagattgctacggccaaggatgaaatgggccactctggtaggaggtgagctcctcctcatggtgcatgcttatgctgagacaacgtaaaatcctagaggggttagcaacttggatcagggctacaagaccagaaaagggactttcaactccgaaatgctatgactgtaggaggcaggaggcttacagttttatctgtagtctataacccctagtccagagtttagatatccttatagtaatctactggggaatattgaagtcccttttgcaggcactgacatccaggccaaattccttaatttatttattttataaaagaagttccttgtacgaatttttgacagaatactcaccctaactcctatttttggcatttctgacctctcgttcttgacaaataaccatgatggcagacttctctgggagccagaattgaagttagagttggatcaacaccctgaaattctaggcccaccagtcaatagattaacagggttacctttgaatttgtccagagcccttattttccaaaatgtttttcatctgctatctttatcagaagtgtatcagtcaattggtgttctctgagggtaataactttaacaagagaaggtgtatggaagtgctttgtaacagtgaaacactctgaaaagttagaagttttattattgttataacctgccaaggccacagtactggttattagcagatctatatctagagtgggttacttagaatccttttggaggtaaataaataacactactgataatttaaaaagaagcaaagtccaagtctccttgattgaccagcaagcaacagtaaagtttagagctggattttacaagcatgagaggaccaaatcagcatcactgaaacacaggtggttgttccagtccagtgagtaactttggcctgaatgtgagtctgtagaaattggccaacgatcatcttgattgggacaatgatgggttggacatggggatgaggtggccaccagcagtggacctgaacgaaatgactttctgcttagtttagttcagaggtcatgagtgtaaatccatctttccctgatggtgaggggcatttacaagctagggctacactaataatttaaagtgaactgggaactagtgattaaaaaatacctccgagtgatgaaaagacactgtttagacttctaaaggaaatggtttaaaaaataattcccaattcattgcaatattaagaacattcttaaaatgttatctttgtcctgatctcttaatccccataaggggttttctgtaaaggttctttaagcatttgaagccactaataccatgagtggaaaaagaacacactcttttaattaaagtggaaaattgctatgttcatgttaatttcaattgagaacatctaaaagtataagagaatacatatttcctggtcttagtatccagggcttaggattatttaagatcagtagccaaaattgttcctattttacactgcataatcaggaagactgttgagaggggaatgttagcaggcgatgggttttagttttccaattatgtcagcctggttggggaacatctaaatgccatttgtccttgacctttgaactgttttctccctcactcttgggcaacacagcaaatgacccttacgaagcagcaaattagtagcatgtgtcaaggctgacacttctgtttttcaatctagttgtctgttttgctatccaaagctgccttcttcaggggtagctgcacttggcagaatgataaactgtgcttctgtttactcatttttcccaaggctaatttaaaagtgctgtgggtaggtaagtgatgttgataatgggaacatcttaagctattaagttgagaactgaaatattagcatgggcaaatagactcatctctagctgatggaaatgagtccatgtactgttttttagcccgagagtgccatgtgtagtttcttttggtctccataagccaggggatctggctccccagagctgggaagattatagcattgagcaaataatgtgctttgagattctttaaggcccaaatttgtcccaattgcttcatcccaggttctcacttttatttccccctcatcggttttggtgacattattttccaaagtagtccaattgcatcaatcattcattttaattttaaaaaattggaggattttttttctttgtgttactgtgtgtgaatattggcccacccgattcattacatataggcagcatggttcactggatgtgtataggattctgaatcggaccaaaagggatctaaatacgacttgtgccactatctagtcttgtgaccttgagcaaggcatgtaagttccttgagtcttatttcttcacctgtaaagtggaaatatctattgctaccttttgctacctttttggatgattgtgaatgtacacagtatctaggaaatagcaagtaattaatatatgctaatgattattaacagctaacattgattggacatctggtacgtgccaggaattatgggaatcctcaaaacatctctaggaaataagaaccattattatcttcacttgctgatgagaaagagatgggctaaatactggctcaatgtcccaaagataggagatggccatgccaggatcgtagagccttcagtcggcctctactcctcatgtaagaagaatggctgtgcagggttttgccacctggagtaagaactgcctaaatatgtatcccagggaggattctaagacctgcagaactccttgctcccagtccctcctctttttcatgccttctcattcatacttaagccagaagctgtgaagggcaaatctgatgccaacagacaggaccacgtggcaagtagacccctggaagacctgctgtagcttggcttcacactcagctgtgaacttgtcagctgaacacacaactgcaggtgcagtgttccatgtgcatgccattaagaaaactccagtcattcaaatgttattttattagaagggaggaatggagtcttaaatacagacccactctattaagatagttgaaaaacacagatgtaaatatcatgacattattgtgctatcaccattacatcatcctgcaaaccccaactctccacaaacttaaacagaagtcatttttattatcaatactaaatacgcttaaatctaagatattaagatcagaaactgtcatagtaactcatgtacagctaaaaaggtgtacaattcagattaaagagatcatggcactttgctctttagttaaaatactagtgtgttgtccatcaactgatgaatggatatacaaatgtggtataaccctacagtggaattttattcagccatagaaaaaaaggaagcactgatacatgctacaacacgaataaacctcagaaaacaatatcgtaagtgaaagaagccaggcacgaaagaccccagatagcatgattccatttacgtgaaatgtctagaaagctaatctatggaaacagaaggtggatgagtggttgccaggggctggggatcaggaagaaaaaggagtggagagtgattgctgtcatgtacttcttggggtgacgaaatgttctaaaattagattatagtgatggttgcacaactgtaaatacagatggtctccaacttactatagttccatgattccttgactttatgagggtgcaaaagagataggcattcaacctgcttcttgatgaggttaggtccagataaactatacgctgaaaatatcataagttgaaaacatccttttgacttaaacaatatttttaactttcaacttgcaatgagtttgttgggatctaaccccactgtaagttgaggagcatctgtatactaaaatccattgaattgtatacagttgtccctcagtattcatgggggattggttccacatacaaattggttatatgcaaatactatagcatcttctatcaaggacttgcgcatctgtggatctaatgaatactagaataccagatccacagatgcgcaagtctttgatacaagacgttgtagtatttacataagacctattcacatcctcccatatactttaaatcatctctaggttacttataatactgaatacaatgcgaatactatgtaaatagcaagtgaatatttgttacactatattgttttacattttgtattatttttattgtattatcattttttttcagaatatgttttatccttgattggttgaattcatggatgtaaaacttgcgaatacaaagggctggctgtactttaaacaagtgaactttgtggaacataaagtatatcacaataaagctgcttaaaaaatacaagcctattatttcctctaattatttgcaaaaatgataatattctttcatgttcagcagctctttttgaataaatagcaatgaacaagaaggcatttcattcacctcctctgagacttgataattaatcttgtcctcacctcctcactttttaacctgcccatcaagtatttgactgctgggaaggtggagttgcagagataattggctctctgcttatcaagcacaactctcaggcaagacctgtaaatctgtctccatctctgcctccttccccgtattccctctttttcctttcaacccttactgctgagcacccagtcagtgttcaaaatcagagctgaactgactcagagcagggacttctgcctctgtgggtcttcactgcaaagggaaccagagccatttgttaatgactaaaaagcagaaactggtggagataaaaagagatggtgtcaaattctctcctttctggatgctggtggtggttatgtaggcagctttcatttctgtaagtgtgcactacagtaggagtgagacaggaaccaggatgccaattgagagaactaagaaaaattgtgattggcatttaggcatcaagagaaaaagttctcttagtgttattgacgtgctcaatttactgtacaagcaactaaggtgatgggcaaattgtatcctttggattgaaatctcaatccagtttctaaatattgagggagtcttgttctctgctcagatttcctgcatccttaaggtattggccagatgagtcactgtggaactgtacaactcagaacccttactccacattcctctggcctaacaaagttgggaggatttacacaaaggtcaagggatcaaccacagcaaatgtggggttgaaacttaactggtctcaagacaggaggtggacctcaagtctgaaaagattccagaagctttgccaaatccaccctctctatcattcagaaacatcaccactgtagtgataggttttaagcactgtaatcaatttttttttttttactcattgggtacctatttctcatttctcccattttcttcttccctttactgtccctcctctgccagtgacagagtaactttactccttcccactttccctaaaagtgccaagcagtagggtgggagtgggcacaaggcatggattctgcaaacatgctttctctgctatccccttgaaggacctagtcctgaagcagagaaagagaagtgagcttgtggcacaaggatatctgtccagaatccaagaagccaggtgacttaccctgggcatgtcgcaagcctgtcaaagtttgaatgcttgcttccgaatgcagagggtgaagtcacagagcctgccagatttaccaagggtgcctgctggggtttgctcctggcaccgaatatcctcaactaccagtctgtgcagctctcatgagcaccaacctgtttgctgattacccgttggcaagctgactcttcagacagattaatatttgccctgggatatacaaggcttttatgacccctccccattgcaaagaaaacaaaaattgactaacttgcttttgatggtggttggatttgtttgatgtggcttgatttggtttacagctcatttgcggcagaatcaaaatggctcgattcaaggcagctgtggtttcagcaaagcaggaggaataaggagttgggaggggtggggcaaccatagcaagggcaagctacagggttgagtcatgagtccctttcacttaaagctgtagtctatgctgtcatccctgtgtcgccagcatctgctcacctggcttctttggaacatggcacacaggatgggacaagtgattctgaaagggcaagcaatggccacagaactcgagttgtgatctcaatccttgtcaaaaatcacttttcagacaggaagtaaatttttagctctaaattatgtaaaatcaggaatctaaccacaacagaggacaaaaatggaaaccttctcataatgtcatttgtttggatggtgttatgggttgaattgcatcctcccgaaagagacgctgaagtcctccagtaccttagaatgtgacctcatttggaaatagggtccttgcaaatgtaattggttaagatgaagtaataatggagtggggtgggcccttaatccaataggacggatgtttttataagacagagaagagacacacggggaggacaccttggaaaacagcggcagagatcggagtgatgcagctacaagccaaggaatgccaaggagtgctgccaccacaagaggctagggtgaggcaagggaggactccacccagcatctcagagggagcatggccctgctgaaaccttgattccacacttgttgcctctagaagtgtcggaaaatacatttttgttgttgtaagccatctagttgtggtgctttgttatgtcagccctaataaactaatacagatgatttatatgtgagtcagctggatttgcctacaaacaccttttctgcaacttcttatatgaaccaatttaaaatttaatagtatttttaatcagtgaaaaaagttggatggtatgggattttgttggcctaatgtggacacagcacatgttttattctagtgtagcagtgatgtgctgaatccctatcaactccaaaggggatggcactaggttcaagaggctgaagaagagatccagagctagaaaatgagacactggggttttactgggggtttacatacaggggagagggtctagtggtggcgggctggacaggagaactgctggtccagtggcagtgggctggtaagaagaaccacaatcgctggcaaaaggcatgcagtttataaaacattttcacttaacaccctccccctagcaacctcagcctggcaaccttcatttaaccccaaacaaaggatgctgatcccctgtatggcccacattccctgggacgggctggggttcagatgttcctcatagataaggaatgaatctctgggatggccacttccaattccttagcttggaactctgaacatatatttgggtgcatctgccacacagggtcattctcagggtaggctcaagtgaagttatcacagtcaggagcacctaccatacaagcatccctgacccctccagtgagaaagttgctcatgtcctgtgaaaagccagtgatagtgctctgagttcactgctatgatgtcttgttattctttctttaaaggagagctctgaccactagaaagagttttaagaatgaataaggagatacaggacagacacagaaaccctggaggacaaatggtgccaaaaggatacttatacctttggcatttccccagcaggaggggaaggaggagtagagggaggtagtcatagtacctcacccttcaatcctcactctggctttgatgttgtcattagcatgtatccccagaaaagtcacttatctctctcagggtttctattttattcaggggtaattgatttccacttaccaacctatccaaaacacatggaggagaaaaagggaaataaattaaaccttcatgttctaggtctttaggaaaagcattttgtggtctctaaagtctctagtctcttggttctgtgtacagaacactcaataccatcaacatctgcatactctaggctcctgacccctctttctagaacacaggcactatattcagaaacctttccagcccaaaggaaatcttgtgaaatctggatatatattattttatttaaaaaaatcccagacatcatgttattttactcctacctatttcagtatatatctctagcaattatgaccatattcttatgtaacccgtgttcttttcacatccaacagaattactaatttcttggtatcaaatatggatatgtttatattttttgcaattcaaaataggaaacacattagtcctattcaaaataggaaacacattggtgaattactctaaattgttgaagttgaagggacctcagggaaacaatttctgttagtacctaaatttctcaaggcagaaggctacatgtcctattgttaaatatcataggacattcgtatgcaatgagggactttggggattatccagctcaacttctcatttgatagatgaggatgctgacaccctgtgatggctaattttgtgtcaacttgactgggttaagggatgcccagatagctgataaaatattatttctgatgtgtctctgagggtgcttctgggagaaacacccagtacacttggtattgaatccatagactgagtaaagaatgtccaccctcaccaatgtgggtgggctttatctaatctactgtgggcctgaatagaacaaaaacatggaaggggtgaaaattttccttccttgagctgggacatccctctattcctgcccttggacttcagacccctggttcttagggctttagactctcagacttataccaggcctctctcttgttctcaggctttggccgtggagtgggagctacactatcagatctcctggttctcaggccttcagaataagactgaattacaccactggctttcctggggctccagcttgcagacggcacataataggacttcttgcctccataatcgtgtgagccaatttccataataaatctcctctcatgtatacctatatatatcccattggttctgcttctctggggaatgttgactaacacaggccctgaaaagccatgtaacacctggtgagtcagagaccaaagcagaattgtaacccacccatttctgactcccattccacagcaaactgattctttaggaatggagatgccatagactttcttagcagccaaatttgttatttaattccaaagttattgtctctggctcactatactcccaattaactgcactttaagctcacttcctccatggaaatagagaccaactagcttgaatgttcttccttctaacctgtcatagttttgaagaccatcaataagttgtgtttcaggcttttcccatcagattaagcagttttcaatctgatcccttcctcacagcatgttttctctccttaaagactgtaaacaaacaaatgaagaacctgtgggctaccaaaaatacatctgttgggagcaaaaaaatgtcacagtctcatttttgccaagtggtcatgagaatgtgctggcaaaacagaccacactcagaaacaggccctactgacctactatagcctagtcttttcaaccatgtttattaaaaaatgaacaacaaatggaaaaccaaacattgtatgctctcactcataagtgggagctaaacgatgaggatgcaaaggcataagaatgatacaatggactctggggacttggggaaaggttgggaagggggtgagggataaaagactacaaattgggtttaatgtatactgctcgggtgatgggtgcaccaaaatctcacaaatcaccactaaagaacttaggtaaccaaacaccatctgttccccaaaaacctatgaaaataaaaaaaataaacaacaaacaacaaaacccttcacatataaagaggaaaagaaatcaggaagctgagattgggacttgggtgagctcttgaaagatttactgagcagctgagatgttgcttgagtggcttgatggctcctctttccttggattatcacagcaagatctggcgctgtgaagatcatattgctttctggtcactctggtgaataagggcggggagtgggggagggggttggtgggcagtaaataagtccggatatctccagggtccaaagttgtgtttggataaatttaaacaccaagttacaaagttgaagattaaactaacaaccactcatcagtggataaaaacattgcttgactacacgatgccaaaatgctggtctgttgttttgactgaagtaagcaactacccggctggttgccttctggcatgaaattagagcacaacctcaatgaactgggatttaatttaattaactgaaaaataaaaggtgtcttttgttacattctactggtggaaaagtaaagtggcaagaaagcaagcaaggatcagggctttattaaaatcacctcctagacagtgagtctccagtgatgcacattggaatcatctgagaaactttaaaaactacggctgtttggctcccatccctagatgttctgatttaatggcgtggggtgccgcctgagggttaaaattctaatgtggagcaaagtttgagaaccactgctctagatatttcctggtgctggtgtaacgcagcccagtcatctaagccatctataacattggactgaggaacatgttttttttccccttttaaatctactgactgaaagtagaacaatccattcaaggctacataaataaaaatgtaatttaatgtcatttagagatttgtgttttttttttttcttagagagttctatcctgttgcttttgaaatgaagacttaggaaacaaatacttctttatcattcagtccgaaaaagaaaataattctgtcctagggaaatcagctaaggaaaaggcatgaggaagggaaaaagagacagagaaggaatgcagagagaaccagggcacaagacacaaaccagatctctcagacctgcctcctgtcctgcttctcgacttccccagcacacgcatgtcccactgtcttgtcctcgcggcctctccactcagcgtgtacgcgttggcttctggtgagagaggaggggagaaaaggcagccagagggagacacagctgcctcacctttgctgagctgttgggttttattgatctgttttgtgtctgcacttcggcctgttctgtcctgattatgtccactgctttgagtcctgacccttatttctggtccctgagttattttttcctcgtggttctgcaaaacctcctcttaggcttctgagggtctacatgtgtttgccacaccctggagtttcagattgactccagtatcttcctgtctttccaggtgctttgtggcttctctagccagaacctaaccctagggttttctgaccatctttgttagacgcggcaatcacgatgcctgcctcagccagtgcccgtcctgagggagcctgccttgggcagccatgttttgttctgggtgacattgactccctactggccttcctcatcccatgggggacctgaccagaacccagggcagctgtggtgtgggaaggccaggggcctatgaggttgtctggtgggaaaagctttgtccgaataggggagagcaggataatcagattccttaccttcggaattcgaactgggaaatatggccacgataagaaagcagcaatgtgagaagcagctgagaagttatgaagtagaaaaacggcagtgtggcaaagagaagtgatgaatgagcagaaaatgtgaggtagggaaatcatacgcagaatgaacatagaatacaacctttgagaatttgatgaaagctcccttccccaacaggcagaataaatacatacacaataacagaattgtgcaagtttgtggactctctgaggcccatgtatgaacccatataaggttcaaaaaagccaattgaatttcttaggtacaaggtaaagccttagttggtgaaggaaaaagagacgagcagcttgggaggacaatctctagaagaggcttcctcagcctcagcactgtggacattttggactggataatattttgtcataggggctgtcctgtgtactgtagggtgcctagcagcatccatggagtctactcaccagatgccagtagcaactccccagtcatgacaataaaaagtgtctccagacattgccaaattcccctgggaggcaaaattgcccaggagagaatcactgccctagaagttgactgagtcatgcatgggagaggcagcatcagggtgaagactcatcaactgcagctgcagaggtcctcagatctggtttcccttccttgagaggcccagttcctattcgtttcctgtctctgctactgactacctccgcccaccctcaacctcaccggctcccactttagctggctagcccacgtgaatctctactttttacagtggttctcaaacttcatcagaatcacctagaaggcttgaaacatagattgctaagctccacccccagtttctgattcacagttctgggttggggtctgacatttggcatttctattaaattcccactcgatgtttatgttgctggtatcgagtccacactttgagaactattgccttccagaaagaaaaagaaaaaaaaaaaagcctagctaatactttttcctgagctcctctaacagaggcagatgagtagaaggagacagaaaaaaagaaaaagtgatgcttcaataatgtctggtactcttcaatttctaatgcagaatactatcagcaaacgtttactgagggtgaggacgcatgcaataacactctactttttaatccttacagcgactcagagataacaatagacattacgatcctcattctactcacaaagaaaacaaggcttggagaaggttagggattggtctaaagaccacatgggttgtaagtgactggactgtagtttgaatccaggtctgtttaaataagtctgaactttctccactttttaagacttttttttaagcagcataactttcattaccttatagaaaatctcatggaggatctccaaacagaaaagagataagaggagctgaaagggtaccagaaggagcatgcagtgagtttcagccatttggcctcctgtcctttgtggacatgctggaggcatcaccagaaaggtccagcgttcctagaaatccagtaagaaagttcctgtcttacaaattctgtcttcccattggttcatatatttcagaataatctcctttaacaaggatatggttatctgattcatctacacatttgagtgcatatcatgaaaggttattctctgatgtcaaagaagcattcagtcattaaataacaaggcaagacaagaaaagagatatggaaatgacactgtagtgcttgggctcttttaatggaaggacacatgcattttagtgggaatcaaccaggaggaaacattcttaaatattaacgtgttaaaatattcacgaggctgaggcaggagaatcgcttgaactcgggaagcagattcgcttgaacccgggaagcagaggttgcagtaagcagagatggcgccattgcactccagcctggatgacagagcgagactccatctcaaagcaaaataaagggttaaaatattaaaatgtttaatttcattaatttcattttatagactgaaatagccatttgttcttatacacacatacttaaagagagtatagtttggaaaaaatgtttaaaaatttagtggtccagtctggcctgggttagggctaaatctcaggcttgaggcttagagctatttgaaaatgttcgacaaaaattagaagggctgcatagctaagagctagagatgagctatttcaattctatgcgagaattcttcagtaagaatggccttttaaaagatactttggaagtttcagttttgcaagatgaaaagatttctggagatggttgcaaaacaatccgatatacttaacactgctgaactgtacacttaagaatagttaagacagtaaatactatgttatgtgtattttaccacaattaaagaaaatgtcatcatggtaaaaccacaacattttcattgaggagatgggcagtcaggaagttttttattttttgatttgtttgctgttttgtgatggaattgctgtggagagattggaatttatggaaaacaggacatgcttcaaaatgatgcacattttggtttcattagtcatgtgaaaggcacaagccagtgagattcaactgtgtgattgagaaaaacaccctgtgtagagaatcaaaaggaagaatatctatatacttattctgtcttattttccagtttcaaagatttaaacttcattttggtgaggatacaatagggcaccagtcaaaaacaatacatggttcacagcaggtttctggatcattcagaaattcttcaaaggacactgtcactgttggagattactttatttcaatgcatctaagaagctatcaattgttttatctgctgccattactttatttactaccaagaaaaaaaatcttccagttaaatcatgatatgcccaaaattataagatgtattccaatttcaaagataataaaatgtatttaaaaagttcttgtcagggactgaggggtaggagaaaggacagatattggtcaaaaggtacaaaaaataaggaaagaaaaaaatacatagctttttgaaatttgatatgggagagggaatattttccatgcagttaaaaggtaaattttgtaggcagttgagctataggaggtttgaataaacatattagccctataattttattttctttttattttttgagatggagtctcactctgtcatccaggctggagtgcggtggtgcgatgtcggctctttgcaacctctgcctcctgggttcaagtgattctcctgcctcagcctcctgagtagctgggattacagtcgtgcgccaccacacccagctaatttttgtatttttagtagagacagggtttcaccatgttggccagggctggtctcaaactcctgacctcagcctcccaaagtgctgggattacaggcgtgagctactgcaccaggccagccctacaattttcaacaagtgctaataataaaatgaatcctggtcaacaattataaacaaagaaaaaagttcctcttagaattgaagatgtgtggtagaaagaaaaaaccccacatactataaaataatccagatacaaacataaaaatagggattttcctagaagacgacagatgtaagcacatacttcaaatattaaaaggaaccaaactaaaaggttaaagataaagtaatgaaacaaaatgcccattatagtctaacttttattactccatagaataatttgcatctgagaggtgttttaatggaaatgatttctcaaaaagatatgtcttaccaaagccagtttggaaattggatattgcatgtatgtattttttcttggtagcccattatcagttctcctaataatttaggataaacttgcatctcaattcaagatttgcatggaatggagaataaactggagaattagagcaaataaaaaatatagatgttaaaatatcatttagaaatgagcaagtagagaaaataaaagtctttgaagtaattacattggtgaaaattaaaccacaaacattaaaaatgtaattttttaaagaattagaattaacacatgaattttccaattgacctcaagcttttaagaaaattaaattaactataatgctccatcccaacttctgagcattatgattactcaagatctgagtgaaaagaaatgatgcgctattatgttcattataggctggaagaaccagatgcaagtctttaaggaactgacttgatttgattattggggtggctccttattagttttattcaatgtaataaatgaagaaaaagggctactgaactctattattcctgaagcttttcactgcaggcaatactttttctagtctgtaataatccttttgagtagctgtaagagatttgagcaaccttcaaagtccatctgtattggccaggtttataatcaattgtggaatttgggaagatacagccaccaatcacataaatcattcattcctgagaaaatagactaggtaataatttgaacacttcttggttgggttgtctcatccctggattacaatttgaataattcaacaattaattctctttcacaaaagtgaacacttactctgtgtgaatctttcttgagagctgtaaagaacacatgcaaagtgtaatcctgtccttgatggacttaggccttatgatgtggggggaggagagatgacaactgtatacagtaactataatgcaaagcagaaaaacatcagggctgccattcagctggctataacatgctggccagtttctgttctgattggtcagtggctatgccagaactgttttaaatattttgaatgttacatctgaataaacttcagtaaacaatgccagttgcctgtctaacatcccttctctgtttcttctttatcagtacaaccctcattttgcttagtatattaatgtacccaactgaaaaaaaagaacatcttccagcctcccctcctacatctaggggtggcctatgacatagttctggccaataagatttaaataaattccactaagaacttctgggaaagctctttcaaactaagccaattcagctggcccttgattttgccttttttgctatctttcttcttgcctggagtacagacttgaagctggagatggggcagctatcttgggaacagggatgactgagaacaaagatagaaggagtctgggtccccaacactgttgtttggctatttcatcattcatgtattgcttacatctggattccttaatacctgaaaaaaaaaaacaaacccctaatgtgcttaagtccttggttaattaggtttggtaactgacacaaagtgtaacacaattctaacagacacactatcctaaggctcagaattgggaaatgccgcatgaatctatgggggtcatgaaagcactatgacatggaaggggtttaaaaggtagaatttcagatgaggagagaaccacagacataattttgttcaatatccctatggagatgaaaagactgaggctgagcaaagtagtttgtccaaaatcccacagccggttactggcaaaatgaggaaagattggttttcttgctatcttgaaacaaaaaagcaaccatgaagaatgaaagaatgtgtggccatttgaacagacaggtatcaacttcaggtgtgtctagaaacatatactgaaaaaaggctaatagttcaaccaaatgtaaatgatgaaaccagatgtcatccttgaatcattgatttccaatcctccccctccccacactctaagtctagtcaattttaccttctaagtctatgctttagggagcctttctggactatgccctcccacccccaactcctcattggatgccatgcccctggaccactctatcatcctgcattcatgacagcacttgttacattgcgtgttcattttctcttaactggttcccgtctcctccactctgtgagggcagggatcctgcccacctgtgtgattaggtactgctcagcaccatgtcataactcaatagctattcataacccacactcagagttggaaaaaatggcaattctcgaatgtttaattttttcactggatgtgaaaatgtttaagtacaagtgacttttggaagcttacaccaaccttcggcaaatctcttcagcctattcagaagtgaataggttggccaaacaaaaaacctagaaatatagataccttccaaagaaattagcagatatatagtatcagggctagggctaagtgtttgatgcctaggttgaactgaatatcacagaattggggctttctgaaatggacttttcaggtgggtttgcacaggttgtgccaagcatatccgggatttttgtggaatcacctggcgattttagatggggatgctgaagttatgttggggttttaggaaatggggagaaaggggaaggcaatatttgctctaatggcacatcttatagccacaacaagagagaaggctgcagaattatctagtgaatttaataatgagcacttctaaatatctaaagaaacagtcttgattgccagtgtgagcaggaccattcttgaaagcaccaattatctacccaaagcttcttaatgaagcttgagaggaaattacttggaaaccttcttcatattctaaatgctaagcaaggaataacagtaaaatttggctccaacacaaattctaaattctttggtgcaagatggtgcacgatgcttcttccttttgcaaattaggaacagataggcagtattaagcggcagatctattatggtggtgaggttacagaatattaaatgacagaggcagtttagaatagtgctatggccaggttgtctggttttgattcttggctccaccatttacttgctgtgtgagttacttaacctctgtgttctcattttcctcatctataagcttgagtgataatagcacctaccacataggactgttctgggcattacctgtaatgcatttcatgcaaagtacttgagtgcctggaacataatctcacccaataaatgtcagctgtcttcactaggtatattttaacagagtttctataaattgttgatatgaacttacaagtctaaaaacaacaaaataaaaaatacaaaaaagttatgattatgcaaataaggaatttagagccagagtcggcaaactttttctataaagggcaagatggtaaatattttcagctttgtggcccatagggtctttgttgcaactataaaactctgctattgcagtatgaagacgactataggaaatatgttaaagaatatgtatggctgtgtttcaaaatactttatttacaaaaatggttctaaaactttatgaaaatagaccactggctgtattttgcaaatctgtaatttagataaatgtatactgctattttccaggcagcactatcttctggaaacgataggtaaatattctgtttctgtctgacattcctcccctatcatcatgattgactccctctgatcaccttatgcaaagtacctccttacagacacacaaacctcgtttgttttcttcatggcacatattgcaatttctagttatctggtatatttgttcacctatttgttttcattgtcctctcacctaaatgtaaacttgagggcaggactcttaattcccaatgcttataacaatgactgattgatccatggtagcaaaagaaatatttgttaaatgaatgaaagaattactgaccacaaagaacttgtatattctgacagtttaatacatataaattaagtcctactctcagtaaaacatgtttatgtattcacgcatttctaagaaaatggagctatgcatttgcttttaatatgctaagtttataaaacagattttctttctaaaatcaatgggccttagaataatatgagtatgacaaaaacaaacaaaatttttaaaaaacgacaaaaaaaaaatcatgggcccgatcataatttttttccagctcatccgtttactcactgttgttaattgaaatcatgtgttctgtagacattttgccttctcttagctctaacactcattattaatacatttctatttaaggcaccagttttgcattcttttttgttttgtatgatgccacagattttcaacaagcttccaaaaaaaaaaaaaaaaaaacccagaacaacagaacaaccagtccctgaatcagatacttttatctttcttttgtttcatgcttaagatttagcatactgcttgacacacagtaggtgcttaatagatatttgtaaatgaacaaatgaatgaatctttattggggtattgtagaacattctatagtaacagaacaagtgaaaggggctttgttccctagagatgcaggtaaacatagagaagaatgtaatttatgtgttgtatgggcaccagaaagtgagaataggaggaatgtaaaatcaaatttttaagtaattttttattttaaattttaatttaatttttttgaggcagagtctcgctctatcacccagactggaatacagcagtggcacaatctcggctcactgcaacctctgcctcccaggttcaagtgattcttatgcctcagcctcccaagtagctgggattacaggtgcacaccaccatgcctggctaatttttttttttttttgtatttttagtagagacagggtttagcctgttggccaggatggtctcaaactcctggcctcaagtgatctgcccaccttggcctcccaaagttcctccaattacaggcatgggccaccgcacctggccaaatttttaggcaattttttttaaagacatagggtctcactgtgttgcccaggctgaacttcaagtcctggtctagagcctctgtctcttgagtagctgggactacaggtgcgtgaggtaactttgcctttgatttgcagcatttagaaaagacagccagagttctgggaataaaaaagagcaatgggaacactgtgtctctcaaattaccatatgcatattatttaccagggtggtgagacaagtaatgaatatattaggagaatggtgctcatctcctttgtattcgtgataaaatatcagccctgtcaaatcatcccggagtgaatattatgaactgtggaaagctagttctcacatcagcctggttcagcaggcactgaaaattgattttcacaaacgttttatgctggaaaagggcacaggagccttctgactgcacagaaatacccatctgttttttctataatctattgctggagcatccggttgtcctgtgggtgatttaataaaagaagaacaaaatgaagacaagaagagatatgtttctctccagggtctgctcctccattagatgaatcattgcaagaaaaagtggacggcccctaatttatgtctactgcacaccaaatgacttctttcctttccagctaagggaagaagtccctactctatgaaaccttaggattggatgaatctttggaggttgccttttcttaccaaatgcaccctttgaaggtccttgttgtggtatgccatacattagaggactctttgaacttggcttgaggatttccatggctttctctatgcttttgccctactatgtacacaccaccattgttgcattattgcaacttaaaaaatgtgcttgctttgcccgcatgagaattaacacaggggtcttaatttacctttgcatctctaaaactttgccatgtgcctagctcatgtcaggccctcaacaaatgttcactgaaatgaaagaacaactaagagcttaatatttcaaaataacacctttcttctctggttagaaacttctttataaaactgcatacaaaatagtctgcatttctgtttgtctatcagtgactcaggcaattggagtttttcaaaacatggctaatgcagagggtatttgaatgctgttgagtggagagagacttccctccaaattaattgtccctgctaattgctttaagcaggactgttcccaatagacgacatatagtttccttaagtcactggtggtgtgaactggttgacaaagaacctccataaatcctagtacaacttcatcatgaccctcaaatctacgatgatggcattcttatgaagctagacctgcttggtcacttccagaatctggttctaccaaccagtccttgtaggcatttgatttgacatatttagtaacaactatttagaaaggactgcactagctgtcagggtgggggatatcaaagagagtatatatagataaaacaaatgaatttcatggccccaaggagctcatagtgtaggaagaaacaggcatccaaataaatcaattgcaatgcagatttgtacgtgtactcttgggtgtacttattgttttcataacatccatctccttgtaatgtgtgcatcgttttatcacactggagattaagttcctctcgtaaaggcctttacatttttgagactcacttttaacagagctctttccaaagcactattgtgttcagtacatgggtggctgccttacttcctaaccgagggctggggaggacctccatgtctcatgcatgcatcattgtcatcgttataactccttctgagaataggaagtcaggaacacaatggggcaccccacagactgtcaatggtttagaaatgtggagacttaattcctctctctgcaggagaggatggaggtttcagaatgtctagacttagagtgatgaaagacaacctcagtactttttggagacaaatgcttttgctggagtgacagcttaattacccaggcaatcaggtcagttttcagaaaatccagtttgtgctcttatttagccctctaaacctttttgaagcaaggcttctttcattcttttgcaaatgagctggagaagatgcaaggaagatagatggaagtggagttatctaattgggttgggaacaggaatctacccacttcaccacacacacacatacacacacacacatgcccaactcctatctaaactcaagggccaagaatgggaaatgatgttgaggaggagagtaggatgctgaactgagctccactctctcttcccaaaattatcccatctaccaagccattagaggtcagtccattttgtcctaccataggtaactgctcatacaattttatgtttaataatttcttaaatatcaaaccagccagaaaggacagcaaagatttaatgcaataaatcccacttttgtgaggccagttactgtaccactgaaatctccctgagatttgctgcatactctagtatcattgcttccaattgttcatgagcaatatcattgccacttctcccctcatttctggaagcatgaaatgccttctcagattcacagaggtctgctatatttccatctcaagaattataaaaacacaattttaaacagcaaatttcttgctttgttgaaatgaactgcatattcatttcattcaaccatttttcactcaaagtaggagttgataatcagacaatttatgtcttgcaggacagagcttaactggaggccaaagggtaatgggactcatgatagctaaaagctatgattgtccagtgttctcaggattcgttgagaaaaatgttttgtgaaaaatcagggcctcaaaataaagaataaatcctaaaacaagagaggcaaacttaaaacaaccacagtttaaaagaaccagaatatagaagagattcaaagtactattaattttcagaagaaaggccttggtttatacatgcacaaatatattctagtgctcaagaagcataggcaatgatatgcagcaaaagagaaaaacaaacaaaaaaaccaatgatttgtcaaattcatatggtatttttcatgcaatcaaatggagaacaagattgtcacagggtagacgtgtcggtggattcactatggtgaatccatagaagaaattagaagaattagaagaaaattgctcttgaaatctcaggaggacaatatataaaatatatttatatgtataatacagatagaaaaacaacagggaattaatcataggtttaagttttatactcatttgtaaggcaatgaacttcagaggtgttttggctaaactccctgaatatgactaccttaagttggataattttgcaatctacccttctaaatatttcaaactgtcttttaaaaaaattgcagttatttttgccttaattatctagaaaactgcttcaatctccacttcactttgtataattaatttttagatgtgggttaattattccatacaaaccaacaatattccaaccattcaatttgtgttgaacttgggagtatagggtttttgagaattggtgatttttgtgcctgtgtgatgccaataaagggggtagaagattcagtttctagcctctcctaaggaaaaaaaggcttaattttatctggggtagatagctactgttttctgaaagctactatgtgagctgagaaggggcaaggatggaagagagtgagctttgatactgaacagatttgggttggaatccaagctctcctaattggtcatgttaacttggacaaactttcattttagaaggtttagatttttcatctgtaagagaagaataacagcgtttacctgatacgattgttgcaaggattcaataactgtagatgagcacctggtatgaaatacatgcacaataaatcctaattccttccttctcttagaaacgaaaggatctttgaagccatttataatagttcaaatcttaattttaggagacttttttaactcaatattttacaaaaatttgatattgcaaacaaggtaattcctagttttaaatgtatcactaacattacttgtacttaagtataaaaaagaaacaaattacaggtaccgtgtaagttctaaggggtcttggaagtatatatagatacagaattttaaatatcaaatatatatatacacaaaaatacacatttacagaatttcttatatttttgaggacagatgatccctcttaagttttagaagaatgcaagaagatggccttgagaaatacagctttaggctgtaaaatagtgccttggactctaaagcaccaaataaataaagttcataatctttatctgaaattcttggaaatcaaaatgtcgagttgcttagtaactattttagtataattagtaagcagctctgtgtacatctgaccaactttaaaagacccaagatttattactgtgggagttaaagttatcagaatgtctattatcagttttgtttgtggttttgagagcatctttatttcttctgactcagccaaatgtggtactccagatctgagggttaactggctgacctagtttggaagacctaaggaagctgtatagttttagcaaattaaaacctttgataataataatattgttattaataaaattgtgctccatttgataataacctttgataataataatatccagttttcatgcagctcacacatatgatactgcaatagagtagcagacaactaagcttcttatggaatttctgataagtgttgttgccattttaaggtgcacttcaaaaggtaagggtctctgctagagagtcttagtgactctaatttatagttttatcatctacttgtttatttaaacacatcttaaagatactacaatatttgtagtgtgtgcctccaataaatgccattgtatttcctactatttgccttcaagtcagaacttgacccaagatatcaataatttagaccttttcagtgggatatttcaaagcatgatttggtacataaattaatcgagagtaagagtgattttctacatagccaaaaccacccaggaagataactacctagtcttttttttttttctgagacagagtttcactcttgttgcccaggctggagtgcaatggcgcaatctcagctcactgcaacctctgcctcctgggctcaagcgattctcctgcctcagcctcccaagtacaggcgtgagccagtgcgcctgagtagctgggattacaggcatgcgccacgacgcccagctaattttgtatttttagtagagacagggtttctccatgttggtcaggctggtctcgaactcccaacctcaggtgatacgcccaccttggcctctcaaagtgctaggattacaggcgtgagccaccacgcccggccactacctagtctaaaatagtattcttgcttcagtctatcatagagcccacttctttctctttattctttcttaccacagagtgaggattgttctatggttttccatcagaaacacatttttttctaattgaagactaaagcacaaacaggccccaaacagctcctgatggtttttgttgcggtcattgttgaaatgcaacgatgggctctgcttttggaaaataagagccttctgcctagacttacgcattctttgcagccttgatatctaaatttcctttaaaacaacaacaaacagaattgtgctgtcagactaattatgcatgataactctaagatggattaaaatgatttaatttataagacagttaattgccatgcagtattgaattaaaccatctacattttctggaaatacagctgcgtgcttaatagtgggtcataaagttaaggcctacaaggggaaagatatatgataaatattggaaagatattgaaagacatatgataaatatttgactgacagtagtgcatgaaaaccataaaatgggaccataggaggtaagaataggaaaaaaaaatcttatttcacatgccttagaggagacaggacaaagtcggagctgaaagagacattttctccccacaataatcaatgacaaagcatctgaaattttagttttctagagtgaattatatggtgttttggcggggagcagctgcattccctccaggaacaagctactgatagttgctaatagtaggcatataaaacatctttgttggatggatgaaggaatgaataaaatgatttgataaagggcaaaaatcagaattgaggggaattatagggtttcaccacgaggcaatatctctgaggctatggtaaacaatattgctatttaccaatatttctagctctccttcctttctgggtacacaggagggccatgcttgctctactgaatttgggcatggctatgtgagccatcaaatgtaagcaggagtgatataattcccttccagctggtggtttctaagagtagtgtgtgatcctccatactactcttgcctcgtagcaatggttgtggaatcatgagttgatatggaaaagctgtaagatggaagcagcagcttggattgctaagccaacaaaagaacagctgctctggagaattgcctagattcacagcagactttgagcaagaaataaacccttgttgtaagtcaatgcatggaggagggtatatttcatagatgagcaagatgaccaagaatagcttgcatacaacttctgtgtgaatttgacactctcccatccacaggtggagtctgtctcctcttcccctttgatctgggtggcaaaagtgatgctgcatgaccaccaagactagatcagaaaaggccaagtagcttctcttagagcatccattgtcttggaattcttttctctgcatgctccctctcagaatccagccaccatagagccaaggctcctgagagggttcatgtataggtgcttttgtcaagagccccaactaatctgagtcatcccagccaggcaccaaacatatgaataaggaagcctccagctgatttcagtttccaagccatttgagtgttcacagctgagaacccagacattacacaacagacataagaccactgtgttgtgtcttatttcctaactcacagaacttgtgagcacaatcaaatgatagctgttttaaacaaattttggggtggtttgttataaagcaactagttgaccggaacaaacaggttgggcttgtttgttaccacaccgtaatttatcccatcataatagaaaggtgtttttcagaaattcacaaagggtacataacaaagtaagatgaaaaatactattttcagttttttggtgttaatatcttagtggtatcaaccttctagggaagttatacaggtataatccgcgtgatccattctccttaactataaaccacatttccaatgtctcattcacgtatgtaagcttttgtaaactgaattcactggggcatagcaatttttactattttatccaggcagatttatgctacaaataactgtccctcaaggaaataaatggtatattaaaagatatttatacatggtaagacgcatgaataaaactgggaggcttatattgtgggatgatttatgtttcagaaataggtggtgcctaagctattactacattataagcaggtttcagatattgccatgtaggttgagagacttagtaaatattgcccctcccaccttcaaatcatcacaaaaaattttagcataggagattgccaatactgtacacaacagtaatagtgattaattagctgactttcaaggttctacacctctaaagacaaatggacaacatgaacccacactagtacaagtattgtctaagtaagctctagttcactgcttcttaattaaactttgtaggccagtttcattcttcacaatatattgggagttatgtacccaagagaaactagagcatgcatatttttagtttgcagagaagtcaaaataaatatccaacaaaagagaaaaacaatccagagcaaggaactaaccatcctctgaagacagtgatatacatgatcatttcatgtcatttatttctcactcacagcaacaatccaggcaaaatgaagggaagtggataaaggcctctgcactggggtgatgtgtacatttcctaagtatcacatgacttaacaggtgcaagctggcaggcatgggacttggtatccgtaagacctggaatgaaattgcagttcctcttaccatgctgtttgaccttgagcaaataacttttgtatgccttagtttccctctctttgatatggagacaataatattgatccttcagggttattctgaataaggcaaatcatgtatacaaagtgcctggtatatcataagcacttaataaaggatggctatcattatcatattttaataaaagagatgattagtagcgatccttccaacacaaagctaaacagattaaataatctttggattacaaaatctagcagttaatttgcttcttgataacttgctgagagaactacaatttggattctaggtgaagtctttacaatgttcttttgtcttgccttctcatgttgccccccaggccaattcgtctgggattgtctctctcaaaagatatgtaatgatcagcttgaaatctgcctgtccagatctgtgggccagagatttagaccctcatcctcaaggccttattcctcacaaaagccatatgtaaaactggctggtaagtggtaattcccttctgggctttcgtcagtgacactgaaatgattggtattatataacaagcaaatagaggaagtgatttgcaagccaattattcatacacacagctagtgttgcattctaagaaattctttgatttgctcagggtaggttgctgcttttctgagtgtcgtttcccatttcttgctcattgctctgccaactgttccccaccattgtacacacacacacacacacacactgcacacactacacacactacacacacacacacacaccccattgttatttctgcaaggctacaggaagtcagctgctttatgccagtgcagtcttctagacccaaagatgatgggtgcccatttggtcctgagaaggatcccaaccccaaatgtcatcccagtttgccttatttgcagcaaagtctcttggtaaccaggatccttgcctccagaaagagcccactggacagatttcaaaaccaatcgcacaaaatagatgattcctttaattggttttgataataattttctcagatcccagaggatacgtcaacaccttcaaataacagcagcttaccaaaatgggattccaaagtttaagattaaataaaatatacttgaatatatttcctaactgaatggaaggaatagtttctaggtagaaaactcatagaattatagaactgtcaagctcaaagacctctgagaagtcagaggcaaaggtatctgacttcttgttttatatttaaggaagcaaggactctgaaagcttgcactggatgctcaaataattcaaggcatagaaactcttggaggctctgaaaatgatctctcaactattttagtgcctaaatactttttgatacatctctaattttgtagttatttagtatcacactgtccttcctattttttaacttatctatttatgtatttatgatcatcataaaggatctgaggtcaagtccttcatatttgaagaaatattactgactctagtgaggttgcagagaaaaaggaaggcttttatgctgttggtgggagtgtaaattagttcaaccactatggaagacagtgtggcaattcctcaaagacccagaggcagaaataccacttgacccagcaattcccttaccgagtatatacccaaaggaatataaaccattctattataaagatacatgcacacatatgtttattgcagcactattcacaatagcaaatacatggaatcaagccaaatgcccattaataatagactggataaagaaaatgtggtacgtatacaccatggaatactatgcagccataaaaaaacgagatcatgtcttcttcagggacatggatggagctgaaagccattatccccagcgaattaatgcaggaacagaaaaccaaacactacatgttttcacttattagtgggagctgaatgatgagaacgcgtggacacattgcagggaccaacacacactggagcctgtcaggggagggggttcaggggagggtgggcaccaggaagaatagctaatggatgctgggcttaatacctacatgatgggaggatctgtgcagcaaaccaccacggcacatgtttacctgtgtaactaacctgcacatcctgtacatgtacccctgaacttaaaataaaaactgaagataaaaaatattaaatcatatgaataaatatacatttacagcttttataaaaacatgttactaacatgcgggaatgcttgttttttgaactgctttctcaataacagtgatagatctacactctcttgtctgattcatgttgtaatcaattctactcatttgtgaagctgaggtgaggtgtgtggccaagaaacagagggaagttaatttgtatacacatgcaaaaagaacaccttattaatttcagaatataaccaattgagctaacttgtttcacctctttgatcacataagccacagctaaaaaaaaaacccatcgactattgggagcaaggaagaacaatgaataagggtatgaattataatacccttgtaaaaccaaatatttgtttaacaaaacttctgtttaaaatggaagccgttggttcttaacgatacctgggacttggatgccatttcacagttgatgaaatgggcagccatcacctttaagacatagaaagtgagaattcaaaggattaaaggagttaccggagattccaaagctaatagaagtcactcccagggcgtgaagctagaaccagggcttattccattgcaacatggtagttttaggctctcacctttagaaaaaaggtacaatggcttacaaaggtacttctaactcattaataaaataaaattcaaacaaaagataattcatgatttcacaaacagttctctcccgctgtaaatattaatgactgaaaaatatataaatgcacacagttttacagattgtttgcatgggcagaacaatacaagttcatcttccttactttgtaattttttttaaaccatatttcaaatcagccaggtgcttattttgattgccacctgtaatacagtttataagtgtgtttactgccatgttaccaaagaacaaagtaatttaaaatgttgtctccatctctccagttgctcaagataaaaaaaaaaaacaaaaaaaaaaacaaaaccaactttgaatcatccttgatttccctctctctctcatttactccaatccaatccaatgatgaatcctgttgactctatctttaaatgagatttttataaatgcaatttcctctcattttccttacttgcaccaccgaggtctaagtgatatttgcctggataaatgtctgcgttagcctcccaatgggtctctccacctctctccttgcccttcagtttatttttaatacaggagccagaatacttcttttagaacgtaagttaaatcatacacttttctgctcataagtgcttaccatctcattcaaagtaaaagtcaaagttatacaatgacctacaagactctccaggatctggcctccaggcatccctctgaaatcacctcctaccaacactttcctcacacttgtgccatttggccagtatggtctccttgatgctcctgaatgtaccgggcaggttcctgaggtcagggcttatgaacttgctattcctgttgtctacaatgctcttcctcaaatgacttccatggattgctctctcagatattgtgctcaaagttatcatgtctgcaagtcctttaccagttctgccttttgacctaggttggaagggatctctctcctccaaacttctagacaacattctgagtaccaagagctcctgcccctgtggccctaagcccacttgcaagacatgcagactgtgagatgaaacctcatggaagaattacacatgctgggtgggtctgcttttcactaaagcttcctcaagtcttgtgactatactatttctcccaggatgtctcgttgcatccttaatttagctcctaattcagagctaagctcatggtccagagcttgaaacagtccatgagcttggctttgaattaggagctaaattaaagatgcaatgagatatcttgggaaaaagagtgtagtcacaagacttgaggaagctgttgtcctgcctgagagttctgtccctagatacatcaacacgaggctattcttttcctgcaggcagtccttcaaagttttcctttatggaaactgtatgtagctgaggccagagcaatatcttatatctgaaatatgcacttcttaccaggtctgagggcaaactcactggtggtccaaatttatatcagcacaatatcctcttgacttcctatggaaggcctagattttgtggggagtggacatcaggatacttcaagggggctgaggtatagatgctactgtatccatcctgaccaccatttcctggttgatgagacaaccccttccagggaggacttgccctcctcccttaacagagcagagttttgtggctcttcggggttgcttatgccatattcaatgtaagcccagaacacagatgaggaagctcagcacagggttatggcatgtccacactggacagggccgtgggtcctcattcattcaacacttccttctactcatggaaacctgaagttccaagaagacactctggcatctactttaagcacacataccctcatcccctcgaagtcagtgaaaagcctgaaaaggcaagggaaaaaacaaataaataaaattctctttcatactcggaactaaaatttcccgtcttgaaaagacatctgtcttcatatttgaatactactttgggtgagttttggcagcctttaaaagggcacctttaaaaatacttttttgtgtgtgttccagctaatatcttcttcccagctgagaaatctgattttcaattaatacattaaaaatttgttcctttcttgctgtgttctaaccatggtatgaagctccctctataagccaaatttatctgctagcctcacactttgagtatttagagaacctgtgggttgtgctgaaaatggcggtccttttctcaaagtcaggtcaggcagggatgttagcactggcatccaagtctttgcactgtctatattctcacaatagcagaggaagatgaatgctcttattcctgttgtctttggtccatgaaaggtagaccacgagcaccctgggcaggcatcacagtctactgaaattgctcgtatgcctgctgtttatatgttgtcttcctgaactagaccatgtgtgtattgagagcaggagagggtctttttggcttgtgttatttccacttacaacgcagtgaaaggaaggaaagaagattatcagggaataaagaaggaatccagaaatgtctagagataactgatgattcacagggtggcttctgatttgcttactgtttataaaagccatattcatattaagtacacaagaataatttactagcatagtgcacagctttgagttttatgtctgtcccacattctttcattttcagaacttccttttgcttactccccatgattcgagtgggactgttaacaggcttaccttgcccaatgaagggtgaatatgtgccccttgctggcacgtattgagagtatccaagtgagagtatccaagcccctctggactctgctaagtccaagagtgagaacatgactcaagcaaggacggtggcttctttttatggagacagatgctgggagacaatctctttccttctgggaccgtgagctgcaaggaacttaggagcctggaaaggctggagcccgtctttcattccacatggagaaagcttatcagagcaggatgttaacacagaggaaagcagagataagagagaggaagggaaggagagatggtagctgctgcttgaacactgcatgcaattatgtctgaagatcaatccagtgagttcagacttttgagctaattatatttatttatagatttatttttgcttagctctgtttgagttaggtttctgacacttacaaccaaaaagtcttgataacaatgactactataacaagtaacaatgaaccagcacaagtgattgagtggggtgtcatgttctacagcatggaaaaagcaatacgaatcagggttcctgacctcatggaagagatctggattacagttctagtgacacactcatagcccctcattctgcactggctccagccaaaagtcaccactgtgacaatttttggcatccttcggccttcttttggcctccagagaacgattatggctctccttttccttctaagggtactccaatcaagataggaaaaaaaaaaaaaaaaaggaaataaacacgaaaaagaaaaaagcattttcctcttggcttagacccattggccccatccaagtcagaaaaactacagacctgcatctgcttataacccagaaaaaactagagtgtcaccagagagccctccactctactgatacaaataaacagtgtcagcgggacagaaagtccttgaatttcaagggaatgtttggccgttaagcaagcatgttaagttagcaaacaaaccaggcctatccaagcagtgggccaccagagctcaggcagacccaaggaatgtggcaaattccttgaggcagctgtttttatagaaacccaagtaattcctttcattgtaacagtttagttcatgatcttagcatggagtttgggggcattttctgtattttccactaaagctatgttaacaagcaaaatttatactttcttttgccctctgttatcaagtgcaacccaagccaccaatacttgggacaatatcactggcatttgtggctgggtccgcatttgtcagaaggaattcttctcttcagtccttttctaagttagccctggaactttagtcatacctagaatgacttttattaaataaggcatgttagagatgaaatataaaagtgatccaattttacagtctaatgtgacaacactcttgcaggggaaaagtgactgaggtgtagaaaggagccagagaggaagagcattacccaaggtacaggatcaattctctcatgggctcagatgtgttactctataacagaggcaggcaaactactgctctggaccaaatccagtccaccaccaagctaaaaatgattttgacatttttgaatagttgaaaacaattaaaaatgaaatattctgtgacatgtcacaattgtatgacatttccatttcagtgttaattcataaagttccactggaacacagtcatgcctattcctttctatggctgccttcatgctacaatgacacagttgggtagtgggtgaaaatgcctttgcaaaaattgtatcagtgagaaaattatggcagtgaaggagatctgatttagccatctctgctcttacctttagtggtcaagctgccttaattactcctgggctgaggccaagataactttggaagacttttaggttatggtttaaatgataatagcccctccccaaaagtcaaccacctttgtaaagccatgagagagccccagtctatggggaggagaggagcctgaattctgctaaggtgtaggctggtcacaagatatgcaaattccccaattactcctgcagataacatcactattgcagattggccttttgagatatgttttcaggttttttgcatgtctgacatggttggctccacttgtaccagatggcttcacccggacctgccaaatcacccttagggccccacctataagtgaatcagctcaagaggacagctttgaccccttacgatttcttctccgcttcaaccaatcagtggaaagcacccatttcctagccacccccacctcttcccctaaactgtctttgaaaaaccactagcccacaagccttcgataagactgacttgagtaataactctgtctctcacatggcgtggccggccttgtgtcagttaaactctttactgcagtgctgtggtctttgtgtagtgggcaggaagaacccattgggtaattacattttatagaggccatttaacctgcaaaagcaaaactacttctatctagtcaattacaaacataatctgctgaccctttctctacaaagatctttctttcaagactattgattatattgctatcccttggaagacatcagagaagcataagatacaatgaaagagcaagtagagttgtcatcctggcttcattcccagttacctgcgcaaccctagaaagtgatttaactcttgtcggtccttacttccctcctgtagtaccttattttagagctggtaataacttcatttcaactctaaaaattatttgatctcacaaaagcctggttgcaaagggataggttggatggttgggagcacattcatcatgaccaaagattaatactaggaaagaggcctaggcaggatcttgttctacaaaagaatacagcattgttgttttatgaggcatcctgatccctaaaaatcacaactctatccacatgactttattttcaaaactgtggccataatcacagaagcaaagtgaattcaaaaatcaaaggacccagctggattccaacttgccaagtactttgtcttgaaaatatctgatcatggtgccagtaaaaggagatgcattaatctggaataatcggtgaggttccttgcttcatcaggcaagttactttttgttttctcagagggtagtgttggcttgcattatctggataaatgccccgactgtctttttggatcggctaatgaagatctggctagagccagtatgcttggcagcccagatacacgttggaaaataaaacttgcacagaagataattttacaagtgttagattcttttccttgtgagccttaaaacactgtcgatcctagttcttttccaaaagtcttgtgagacagaaaaagcttgaggtttgtcaggtgatactttttaaagccaattttccaaggctttaaaaaacttgagctgctatggatttagcacttaatcatattcatctgtggacgtgattcacagtcacaataaatagctgccgcttttccaatgagtcctgtgcatcaagaaaaatcctgggcattaaattctaacatttgtcacaagacctgccaacccttatcctttccagtaacaaaagacttgtcaatgattatggtgaattaagttctggttacaacataagtgtggcacacaagaaaatctatctatcttagcattactattttgtaaacttcaatgtgatttcacctttctgctggatcaaaaaatattttatattcaagattggctcccaaaacaaaccacaaagtttgagtagctcaaattcatagggctcaacattctttctaccaaaaggagcttcttggcctctagggtgtattttgtatactttttatccataatttgaggaaatatgtacaaggattttccattcaaaataagtgggaatacaaaagtagcataagaatgaattttaccggattcttatgaaactatgtgagcacactaagtacgtaatcacatacatgccctccgaagagattgctacttgggactgcagtctcagaatgcaagccttctccaacaggagggtcagagctgagcgggatctcagagataagctggtccagttgtttcataccccagatgaagaaagggaggctctggaggggagcaacaggtctgagtgagcagctcactggctgcagaactggatccaaggtctacctctccacatgcctcgtccctgtgtctcccgggcagtttcctctatcctgtctccattgtgaccccttgtaagtaaaatgattcactgttttagaaatcattgccttgtgagtggaaggggagtacgttgatatattccaatggactccttgagttaatttgcctctattttctgccagtggatcttgttgaatcacacatacctctgcaactgggagtccttttgagacagccaggtgggaaggcggttcccagaaaactccaaccgacttgcgcactgggaggaatacacactggggtggagccacagaagtttgctctgctggcagaggggaggagtctggcccctcctcttcctgggtggcacctgggattcaacctgtgaggtgggaagtactctagcagggactctggctttggagagggcccctgtttctaatttccccatttttgcccaataaatttcatttttctccccctcgaaatcgtctgtgagcctaatttttcatggccgtgcgacaaggacctggctcttcgctgaactaaggaggaagtcctaccacactttgctgttatttgcactagcagacaacgagtccctaagtcttcctgaaagcctgccagaatgatgtgggatttactttgcctgaacattaggactcagcaaatccagaggaatgccatttcatgaggagcagctaggatgcgagataatgacaagtgaattgtgcattcaggctgcataaaagaaaggcttacattagaacatgagtggaaggagtgaggacagtggctttttaaatttctattcactgctggtattatcagagtggaatttgcaaggcaaagggtcagagacatggtaagtgctacagggagatgtatttgactaaaggaagtatatgtattgctgaaattgtacatgtaaattgaataatagatttcaatgataaattcaaggaaggcttatgttaatttcttaatccttctcaagtgcctacattttctaactttttaaacatcaactttctctggccctagcattcctgagaagttcatttattcatgcatgcaggcatcaagtattcactgattgctgactatgtagaagcagtgtactagagacactgtgacaaatagatggacttggctgctgatgaaatgcaacccaagtaaaggtaccaggttaaggtagacacactatatgactagttggtaggaagctctggcaattcatatactgaaaacatgtggctgaaagcctgcttattgaagctgaggtttgagatagaactaaataagtttttagctattttaagccgtcagtcacgtcatttttgcttggaataattcttcagattggattagatataaataactgtccacgtctccttggccacttgccttagtggctttactaagtacatgattactattcaaagactatataaagaatggaaacttatacaaccaattagctgatatctggggcttacaatctagtggaggacacaggcaagaaacaagtaaacctgatgacaaacataataattataggcagtggtaagttccaataatacccaacaaagccaagaacagtttactaagggtgctcagggaagggatctctgaatatgaaccatgtaaagcttatacataaaaaatgcagaggagtcaactgcttgagattctcagaaaaggcattccgggcaatgaaaatagcaagcacaaaaagtctcaaatcgagaaagcacttcgattgcttgagatgttgaaaaggcaagcatggctgcaatatatgagaaatggagtctggtataagactggggaggcaggtaggggctgaatgcatcagggtctacaagtgtggattttcttctaagtacactgaaaagccacaagcgtttaaattagtgatacagattttaaaatattattttggcaactgtgtgtacaatgaaatggagagagacaatggaaaaaaaatagaagcagtggaaccaggctgctggaggactcagtccagttcagagttgatgccaggattaggatggtagcggtggaactggtgaggacaggtaagacttgagatatatttcagggacaaagatttcagggataagatttgctaataagatttgataagattgaaagagagtaatcaaagatgattcctaagtttctggtttgggtctctgtgttgaggatggtccacttacgaatgagagggaaataaagagtccccttagtacatttacatttaaaatgtcagttaatgggtgacttattaaagttttataactgcacatttcctgaattagtttttacctaagcagttctacaatgtgaagacttagagactcaaggagaattctgctgatcttttcttgggatcaaaaattactctggatgactttcccaggtgttctgctcttccatcaaccaccactttgccctgcccaaatcagtgcagcatcctactataggaacaaaaacaaacaagaactcaaagcgggtaaaaacaccagcaatgaacacctgcattccatgtagctgcataacagagactctctgattaactctatcgttctttaccgaatggctcacctttgaacagtttctctgcattgtaccaataggcaaggagatagcaagttacaccattcaaaaattgctactgaatggaaataatgatttcttcttttacacaaaggttctttaggtgttctcaggaagtagaaccacctatttcatttgagatgtctattgaaaggggtttttgatggttctgttcaagccaatttatttctatggacttattttcttaggtcataaacaaataatgcctgggtaaccattggcctttggaatctagtgattcgggcttatttacagtagtacgatcttaccttggggtagctccagagtttacagaagaggctaattcttatggaagaatatgtgaagtatttactgaaagaattatatgccagggatagtcttatttgtcttataaacctttataaacatatggttgaaaagtttgagaaattaaaacaatactgttccatgactatttcagcagaactgaattctgctggtgaacgtggaattcacattctaggagaggagaaacctgggacttgttaagggttagtctccatggacaagctctttcagacaatctttgaaacatgtccaatattaccatttggttgatagtaatagtttctatcctcatattcctacacacaacttaactacacataggtccatagtcagaaatgataccatttagcattcatgtgttgcaaataatgatacagagctttgattgttgaggccaaggtttgagacagaacaagacatgcttggagacactttaagattgagtcctccataatcattcttttttgtttgttttgcctcagaatagtacttcaaactaaatatgaattattgtctaaggcttcatggtcatgtcccctagtggtcaattctagattgtctgatacgtgttatagccctttcacatcttttcaatattggaataaatttccagccacaatcaactctgctttggatagcatggcttgtttaatgtgacaactggattttgtaataacaatgtacacaaaagacactcttggggaaaagaattcataactggagaatatcttgttttttcaactgtgtaatctttatttttttcaaatttcttcctctcttacatccatttagatttggtagtccacagagttaaccaggtaatttaattagctgggatggttgagcctttggactgattttgccaatatcttggaatacattattgcagatgttcagagaatcagcattcaatattctcctttcaatcttgaagacaaataggagaagaagctctgatactccacaaaaaatgagggtagacttattcttagataaaaattctcaaaggaagcttacaatgaatacaagttgtgaggcacacatataatggccacactgcagaactcttacaatccttgcaataagagcaacagctcatatatcaattgactatatttgctttccctgtgtattatattgctttttaatagtaattattggtatgtcagcatcatctggaagtttgtggctaaattggttccaaatacacacccttaaacatatgataagaaatagtggtttctgttttttgtatatgctagagtcttaggagttcaattggcctgacattcaagaatggctatgatggtaaattcaattctatacaaactttttctctaagaagaaattacttctacctctagctaaaatggagtagcttattcacactaatgctgctgctaaaaataacatcaatctgtttgtctatcatctatctatctatctatctatctatctatctatctatctatctatctatcatctaactctttaaagatattggtcaatgagagggatccaagatcccacagaaaagggaagtagattgaggcgagtctcatactggcttctcttcatttcttcttgaggcatttgccaatttttggagcaagaatagatgtggcattaaataaattgttctgggatttgagacagtgtcactgggctaggggctgccaatatgactgagttttgaaagtcaataatccagggatgagagaatcacagaaagtgagcccagactaaaactgagaaaatacataccagcagctctgaactaaaagaaatattaataggagttctataggccaaaaggaggtgttcatggaagtatgtaatgtgggaaaaaagaaagttcattgaaaacagtaaatatagggtacattttttaaactgactatttaaaacaacaataaaaatgtcttataattttaataatatatgtagaattaaaacgcatacagtagtatggaagacagaaatgatgctaactaaaggactaagttaacttaagtagactgtaatgagtgaaagatggatgctataatccctgggttagcactaggtgaattacaacagaggcctaattaataaggtaacaaagaagataaatgaaaatgttttaaaaattgtcattgtttaaaatttttataaagcagggattaaaatagaaacaaagaataggtgagacaacagaaaaagaaatactaagatggtaggtttaaattcaaataatccagtaattacactaaatgtaaatggattaaatactctaataaggaccaagaaggttgaaaataaagatatgggaaaaaaagaccatcataacactaacctgaagaaagttggtagagttatacataatatcagataaattaaaacttaatgcaagaaatactattaaatataaaaagtgacatgtcataatgataaaagggtcaattcatcaggaaaataaagatctacattcatctaattacatagacccaaaatatacaaagcaaaaacttccaagactaaaagcagaaatagacaaatacacaatcatagaagatgttagcgcaccattctcatatctgattaaacatgaaaataaaaaattagtaagggcatagatgatttctcaacatgattaagaaatgacttaattgacgtttatataataaaacactacagccaacaactgtagaatgtatgttccttttaagtactcatggaatattcaccaaggccatatcctgaatcataacattgtttcagcaaatttcaaagggttgaagtcatacagaacatgcattctgaccacagagaaactgaattaggaatcaatatcagacaagtaactaaaatatccctaaatatttaaaaataagcaatatacttttaataaacccgtgggtctaaggagcaatcacaacagaaatttaaaaatattttgaagtgaatagtaataaaagtatttcattccaaaaggagcaatgaataggctgagcaatgattgttctttgtgaacaaaaatcatggaagaattaaatagccctgggaagtttgaagatcttgttttatttatggtgcaggtacatcatggatttcacatactgcgagttgataaaacgatactacaagttctaactttatttacatttttctttattcatttgatatattactaatataggacttcagtacaagatcatcctgttcatttcctgattaggttataagtgaatctggatcccacacctcaaacctggaaagcaggatcttcatgaagctgggtgattatggggcagaggaaatacttttctgaagtgcttaactgagaatcattcattaaatgatgattggccgttttcccgcagtagcattgcagctaattagtttcatattaacttcattaatgctaggttttgtataggctttcattccagcaagaacaacgaagaactgaatgactcaaggcaaggaactggatgcttgtcaaacatagattgacagtgtattggactcgacacctgattatttagctctattatccatatctagatatgtgtggcttgcggaaagaccttattttatgagatattcaagttctttcttattggtttatcagtaaggcaaaaatatacttcaggcttataaatatctgggtataatagttaggtcaaaatgaaatatgattaatttctgcattctaactctggtttctgagaatggcccaggaaatctcaagaaaatgctgatggaacagcaggcattctaatgatgtaaattaatattgaaaacaggacttcatgatggtggaaactggatccctaccaaaaggttaaccaaggagccatgttgcatatcccttcatgacttcaacagtttgtgttgtttgactattgcaatcttgggagtctgtgtagtcattacaacaattttagcaatgattcttatgaggaaatatcatggaagatctccaattaattattgatttaccaacacccacgagggttagcttttatcttgttccttaccctagactttttgaattatacgacttttggacatcactcaatatttattggaaagccaaaattgctggtggtatggaagtttctctacttctatatagatctctctaggtggctggtttcttgcatagtctgcgtttagcattctataatgcagataacctgaggtggctctccaaattcatctacagcatgagtttcctgtgtgctgcttactgttttcatatgaggctcggtctctgtgatggagggagtatttcttttagaagctaccacgtaattttctttagtatagcattatagaatcttactaagtaaagctgtttcatggaggtttataaaaatgcaaattttggtttagtcaagaggcttcactgagaacacattattgtcatcccacaatccatcatgtaagaaatcacacaaattgaaatggtaaaatagatgctatgtgctgcaatataagcagccgtgtgtacactgtgcattttgattgcaaaatttgagtctgaggaaaataactgatcctgctggtggaaatataattcaagcatcattagaagtttatcatatgccttaagcaaagggggccactatgaagtctggagttagtggacagtcaagagcagaggacacttcttcctaggactctttattcatttgcatcattttgtttgcttcaaaatagaaataaaggcaggaggatagcttgagcccaggagttttagaccagcctgggcaatgtggcaaacctctgtctctacaaaaataaaaaaataaaattaaaaaattagccaggtgcaatggcatgtgcctgtagtctgctagtgaggaagctgaggtgggaggattgtttgagccgagaagtttgaggctgcagtcagctatgatcacaccactgcactctagtctgactggcagacaccactgcactcaaaatgcaaaatgcactctagtctgggtgacagaacaagaacctacctctaaaaaaagaaagcccctttgcctataaattccatagagatgaactgacttcaaaatttaatatgccctaaaacatctattgtgagcacagatttagcacaagggtcagagcctgagtctagtttatttaatcagttcattaaataaacatatattgagggccaactatgtaccaggcactgtaataggcactaagaataaagtattgaacaaacggacaaagtactgtctctgatgaaggtttaaaatttagtggtagggaagaattgcttatcagtattagagggtgaatttagtttcctcttttccggcttgtttctgtttgctgtttttccctgtttttttttttttttaataggatctaattttacccctataatttgttgagtgatagaattaaggagtaatgaacactaattctttcactgatgctaaaaccactctggaaaaatcctgccataattactgcagcaaacactccaagatctcaaatgagccacagcagggaatcaaagagtaaacaaatcatgacagcaacccttgctgctatgtaacaacttgaaagtcccaggatctgtcatctgagaggtttttggattcatttccagagaaatttaccattggatagaggtgttattcagcatgctgagtcctaaaacttgagcctgcccagcaagttgtgagctaatggctcctacagagtggcctgtgtttttttatttgcagttgaggaccatcatctcagtaactcctgtgtgagcataggtgatggtcaaactgtttagcaactgggctgttttgggcactgaccactcagaacagatgtacctggctgtgctagacaggggaaaggagatgctttcattgctggcattttaatggggtccaggacactatggggaggggatttaggaagaaggctaagccagcagtggaagacatttggaagcttggggcagtggaatttgccaactgaaacaggaagtatttggataaattgaaggtatgggatgatggggtatgcctgggttgtaggacatggaagacgtgagtctggggcctgcttaagttcatccctcaaaatgtcttgcctagggaccactgtgattttctaataatagcccttaattctactctagatgatatcttttaaagaacctttactttttgaaaaaagtaaaaacttatttttttgtgatgcaaaaaagtctcacttaagtgtgtattttgtcaatgttgaatgcaaatgtatttatttattttttgcccagtcacagccctcaggttgtttaacatgaggggctggggcagctttgtgaaacgagcccctaaaacctctaaaccgaggaagaggttaacagtgcaagctacatggtttcagaaaatgtgagcatgtcccgtgagactcaaggcaggctctttatctcagaggcatcttaaatgctgaaagcaggacacagtgaacattcagtctgtactacagtgactgcaggcatgacagggccgtgagctggaagacctgcccaatgtcttccctttgcctctcctgtcttcacccttcctgacctgcaacctgctctgaactatgtggactgcatctaggggctctcttgccttctgactcccaggatgagcttgacccacagggaggcttggtaggaggttggaggaagggaaggagtgaggctgagggtactcatctccttgctgcctggctgtcaccttgggctgactgaaggtcactgcttccctccagatggccctttctacagaactctcccttctggggttgtggtgactgtcccaccctctgacccttccgacatgggttggctctggaaccgtacagttgctagccctgacactcaattctcctgtggttttgaatactctgctgacacctttgtaaagagttccattgtcaagcccttctcagtttgtcctgtttcctgtagggatcctgccctgtggagaagacaaatccctcctcccgactgatgcggcagcatgagctccctgtcctcccaccaggccatgctacctctgacaacagtggagactttgtgtctgtttttactgccgatgtactttgtcttctggggttatagaggggacttgatttgttctgaggaaaattttatagtatttatttaaggagaaatgagttccggcccaggaaatggttctgtgaaaatgtaataaattcattttgactttttaaccatatggataagaagatggtttctgatacttaggctgttgggtttagatttttttctttttttggtttgtgtgctttttgtctagtgttgcaattgttcttaagatggtctctagaaaaattagccttgaaaaacttgtctggttggcaaagcacatcttgttcccaccctttgcctccacattgttcactcgttttgtcctgattcaaacgttctcctatcactctcctcccacttgccccagcccatttgtggtataatttgccaaggtcttgttttccatggacacccacatacatgttggctgataaaattcaacatctcccaggagtggcttcatttttacaagagcctcttacaatttagaaaagcttcactgtgatggtagaatggcaggtggagaaaatggaattactattttgggtatagggtccattcatgccctgctttttctcttcctcagccttgatcttgttccctggggagtgagtcagtttggtgcagaggaagtcaaagcaggtcttcaggaccccgcacagctcagctgaaagaatctggcagaatcatttagcagctcaaggggcaagactgacctgaagtccagggcactttatttaaggaaaaaattggcaaacaaaatgcaaaaccttgccctcctccaaggcctctggcaagagtgaccatccagttcagaagctaaattcttccctgtttctctttatttttggcaaccaaaactttcctgcctcttatgtcttcaaaacacatcacatccaattgaaagacacactgatgcttcagtaagcaaactgtgaaatgaatgtgaaagaaataaattattgtttatatgcattcctttaaagggtagtttttttttgttgttgtttcttttcttttctttttactttttttattatactttaagttctagggtacgtgtgcacaacgtgcatgtttattacatatgtatgaatgtgccatgttggtgtgctgcatccattaactcatcatttacattaggtatatctcctaatgctatccctcctccttccccccaccccacaacaggccccggtgtgtgatgttccccttcctgtgtccaagtgttctcattgttcaattcccacctatgagtgagaacactgggtgttcggtttttttttttttttgctaagagacggagtctcactctgtcacccaagctagaatgcagtggcgcgatctcggctcactgcaacctctgcctcccaggttctagcaattctcctgcctcagcctcccaagtagctgggactacaggcgtaggccgccacgcccggctaattttttgtattttagtggagacggagtttcaccatgttgcccaggctggtctcgaactcctgagctcaggcaatccacccgcctcggcctcccaaagtgctaggattacaggcgtgagccaccatgtctggacactttgggtttttttctacatcgacacatgcagctctggtttattaatttcctctgctggaaatctcactatttgaaaacaccacaattaaattattcacacctgctgatagacaacaaagtgttttccatgcctttctctttcaaacaacactgctgtgaacattctctagcttgatgacaggcctgaattagatgctgtcctttgccttatccaccattactccctgtcttctacctagtttttcaatgaaaccctcccacttgccccacacccaagtccctctacttgggctccttgcctcctgttgtatgaccagaaccttattcctatgacctgtctggggaccagccaccttgactttacccttgtgaactctttcaggatgaatttcttgtctctgcctttcagcttctgggaggaaatgttgggtaagacccccaccctgagtaccacaaagcctgtgagacttgctctacttggaccaactccttctggctcacacttgacaagagtgtaagctcagagaggcaagaatgggtctgacttagacaatattatgtgctcagatcatgttaggtataatataaggatggtttaaaagttattttgtgacttagcaaatgaaattcccatacttttaggtatcagttgtcttgtagacgtatcccaattaaagataaatggatggacagatggatggatagatagatagatagttgatatggtttggctctgtgtccccacccaaatctcatcttgtagcccccataatgcgcacgtgttgtgggagggacctggtgggaaataattaaataatgggggcgggtatttcccatgctgttctcataatagtgaataattctcacaagatctgatagttttgaaagcaggagtttccctgcacaagctctctctctttgcctgctgccattcatgtaagacacaacttgctcctccttgtcttccaccacgattgtgaggcttccccagccatatggaactgtaagtccattacacctgtttcttttgtaaattgcccagtctcaggtatgtctttataagcagcgtgaggacagactaatacaatgatgggtagacagatgtgtgctaggtccagtatatagtgacttacggagagtgtagatgtggatgccttgggagaatctgctaagcaaggaggaaaaggccttttgtaaactttgcctgaagagtttctaagaacaagtctcctaagccttaatatttcagaggtagtcctgtgccaaactgttctgcaagtgatgcccaccttgctctatgcattttttccagtgtgaagactggtcttctcaaataggatgctattcgtaaggaagacttcacaaactgcccccacttcctccatataatcaagaatacactttctctagcaacatccttccacactcactttcttcttcttattgttcaactatcaatgatcttagcacacaaagttacaagatactgagaggccaaagggggaaaggatctaagtcacctgaaatcccactaaacagggacagctattgttaacatttggtggtatattctttgagaatttttccagtatgaatatatatttattatatgttataatatttcatgtaatatcatgtgtgtatattagatgtaaataaacatatacacacatacggatgcacatgcagcccccatgtttatctgcctgagtgatttgataaaactcagttgagtctttctgtactgtcccttgttatcatctatttgtctcccaattttctgtgactcattcatctctttgtttataacttctcccacttaccattttttaaaggcttttccaaaaatcaaggactaatttcagtagttactaatctgcttcaaaaaaaccatcattaattccaagtttaacattttttaactttcttttttattttaaaaattcagataaatttacataccacaaactcacccttttacagtgtacagttctgtggggaaaagcaagagagatcagattgttactgtgtctgtgtagaaagaagtagacataggagactccattttgttctgtactaagaaaaattcttctgccttgagattctgttaatctataaccttacccccaaccccgtgctctctgaaacatgtgctgtgtcaaactcagagttaaatggattaagggcggtgcaagatgtgctttgttaaacagatgcttgaaggcagcacgctccttaagagtcatcaccactccctaatctcaagtacccagggacacaaaaactgcggaaggccgcagggacctctgcctaggaaagccaggtattgtccaaggtttctccccatgtgatagtctgaaatacggcctcgtgggaagggaaagacctgaccgtcccccagcccgacacccgtaaagggtctgtgctgaggaggattagtataagaggaaggcatgcctcttgcagttgagacaagaggaaggcatctgtctcctgcctgtccctgggcaatggaatgtcttggtataaaacccgattgtatgctccatctactgagatagggaaaaactgccttagggctggaggtgggacctgcgggcagcaatactgctttgtaaagcattgagatgtttatgtgtatgcatatctaaaagcacagcacttaatcctttacagtgtctatgatgcaaagacctttgttcacgtgtttgtctgctgaccctctccccacaattgtcttgtgaccctgacacctccccctcttcgagaaacacccacgaatgatcaataaatactaagggaactcagaggctggcgggatcctccatatgctgaacgctggttccccgggtccccttatttctttctctatactttgtctctgtgtctttttctttcctaagtctctcgttccaccttacgagaaacacccacaggtgtggaggggcaacccacccctacacagttcagtggtttttggtatattcacaaggctgtggatccattactacaatcaattttaaaacatttttttcaccacctaaggaaactaaccatcagccagtcattccccatccccacctctccccagcccctggcaaacactcatctactttttgtctgtatggaattccctattctggacatatcatacacatggaatcataaagtatgtggtcttttttgactggtttcctttacttaccataacatttttgaggttcatctatgttctagtatgtatcagtacttcactcttttctatggctgaatcctcgattgtacaaattaccacgttttgtttatctatttatccattgatggatatttgaattgttttcaagtatgtggacagtgtgaatagggctgctataaacattcatgtacaagtatttgcttgagtatctgttttcagtttggcggatatatagctagtagtggaattgttggttcacctagtaactttatgttcaaccttttgaggaactgccagaatgttttctgaaatgactatttcatttcgcatgtctaccaatagtgtatgagggttctaaattgtccacatccttgccaacactggttattgcctgtcttttttttttttaatcatagccatcctagtgactgtgaagaggtgactcattgtcgttctgatttgcatttccctaattagtaatgatgatgagtatcttttcttgtgcttactggccatttctatatcattttttgagaaatgtctgttcagatcactttgcccattgttaaactgggttatctttttattattgcaagcttaactttttgaaaccaaatttttgcgactcagttgcaaactaggccttcaggaaagatgatttaagaagtatttctacacacagtagatcttctttgtcttctcacttgctcttaggagctgagtatacttgactcttatgtgtcatatacatatactgagtatcggcagtttgctctgtaatttacatgattcatagggactgaagatagacatatggcctatgaagcaactagcttgtaatcagaatacacactggtagaatttgtctgcgtgtagagaactgcaaaatgtacactgtatgttcctatagaaacattatagggaagagatggttgggttaacggtattagttattacactgtctgccattacataaaatgtaatgaacagatgaaaactagcaaagtttgctctatgataaatttagtataactgagtcccattacctcactgaattacgaaatggaagtatagtctgttagagaagatttctgtctgtgaataaatcaaaaccacattttaacaatgcaccaaacctttttagaaataccatattttttaaaagttatatttatgaaaaaagtcacaaagtactatcaatattaatatactagttaagtaaaaatttaacaaaaaagtgcaaatataatccagtcctggaaattctatctgtgtaaatacagatctcacttttcttgaagttttgagataggatttcttaaagtgtttgtaacctggctaaagttttcaggaatggacatctcctcatgatgtcataggcacttctgagacctttagagtgactttttaaccttccttaacataaattcttttgttgattttcactatcctcacaacaaaggtctcaaggctctctacacctaaggagccctatccctcacagaatcccaactactcctgatctcaaccacatacctcttcatctcactacatacaggctgatctcaaaatctctccagttttgagagagaaaaacaccaatccacacagaaatgtgcccacagtgtctagcacatagtgagggatctgcaaatgtttgctgggcaaataaaaggatatatttgccacgcgaagccttgtttcctgtcttgattcatctgttcatcccatcattaaatatccatatctaaaaattttgcccacctgtcagtatttactttctttctgtagcttcatccatgctgtaattttttactgattgctagctacaggccacgcgaataaggcagttgtggtaatagatgcgacatgggccctgctctcatgaagctcccaattcagcatggtgggacaacaataagcaagtgagcaggtacattactacctgtgcctcattgcgagtgctcagtgggtcacacagtgacttgataacagcacctctctatgttcctcatacatatgacatttgacatttattgcctatcacactgtacagttatttaattgcttttatgaaggtattgatatagtttggatgtgtgtccccacccaaatttcatgttggattataatccccagtgttggaggtggggcctggtgggaggtgactggatcatgggtttggatttcttatgagtggtttagcacaacagttcccaaagtttttggcaccagggattggttttgtggaagacaatttttccatggactgggacggggcagagagggggtggttttgggatgattcaagcacattacatttattgtgcactttatttctattattattaccttgtaatatttaatgaaataattatacaactcaccataatgtaaaatcagtgggagtcctgagcttgctttcctgcaactaggcggtcccatttgggagtgacgggagacaatgaccgatcaccacgcattatagtctcataaggagtgtgcaacctagatccctcacatgtgcagttcacaatagcgtttgcactcctatgagaatctaatgctgctgctgatctgacaggaggctgagctcaggcagtaatgagcgatggggagcagctgtaaatacaaatgaaactttgcttgcttgcccgccactcacctcctgctgtgtggcctggtttctaacaggccatggaccaatactgatccgtggcctgggggttggggaccttggtttagcaccattcccttggtgctctcttcgtgatagtgagtgacttctcatgagatgtagttgtttaaaagtgtgtggcaccttgttctctctctcactcctgctttggccatgtgacatacctgttgcccctttgccttctgccatgattgtaagtttcccgaggcctccacagaagctgaacagatgccagtatcatgcttcctgtatagcctgcagaaccgtgagccaattaaacctcttttcttttcttttccccccttttttttttattatactttaaattctagggtacatctgcacaacgtgcaggtttgttacacgtgtatacatgtgccatgttggtgtgctgcacccattaacttgtcatttacattaggtatatctcctaatgctatccctccccactctccccaccccatgacaggccctggtgtgtgaggttccccaccctgtgtccaagtgttctcattgttcaattcgcacctatgagtgagaacatgcggtgttctgtccttgtgatagtttgctcagaatgatggtttccagcttcatccacctctttttttaataaattacccagtctcagatatttctttatagcactgtgaggatggcctaatacaggtatggatctcctaccttctcaattcaagattgaaagtgtttttgaaagcagttgtacatagtaggtatttaaacatatattggtcattagtatgtccttgagtaaaagtaatgagcagcacatttagtcctaaaatggccaattctcaaggctctgtgcaaatggaaatttgtcctcatagcttcctggtatgtatagttaaatatctagcaaccagctaacctctgctgactttacattggaattccactagccattcaatttatttaaccaaggataatctcattaggggttaaaacttatcagaatcatgcttaataatcctggcattgttttacattaactaggcattagagtttagctcttagtctaaagaagggtgagccacatgttgcaggtgaagtaaaagggagagaagaatgatttggaacccttaatttcaataaggttatggggagaggtgctgtgtgcttatattaattttgaattatatcatgtgtccattaagttcagaaacatttctaggtagatgtctattaagtgagagctgccactcagactacgttattcttttagaagagtccttcttcatcccttaatagacttaataacacaatttgccatatccaattttcataacatcagaactcatttacagattaactgcaattctttgtgaagtaaggcataaagaggaggctaaaataatttagcccagcaaatcccttttttatgattaatgggaatagatcctcaagccttcttaagcagaaaaggctcttaggagagaaatacctgtgccaataacacaggctctatgtgcctgtgcttctaagtagaagtcgtctgggttgctttcctccttggtccacacaaatgtgaatgtttctccaggttcttctggagacatgattccagtagtcctgatagctgtttggaggtcttcaactgttgttaggtagagttggccaattatcacacatgattgagtgtgtactttaaggatattgtactacctcaaactcatgactaccaactcccactgcatttgttgatgatttttttttttacatgagaaagactaacatgttggtccacggtctcatgacaaacaaggggctttgatggtactctgaccagatcagtacttagagtcttccagacaaatgaaacctttgtgaagagaattttgctaaatttaaccaccatctatatatgtgctaggtcaaataaggaacaactcataatggctgacctaaagaaactgaggcactgattctacctgagcctaaatcccagagttaggtggccaaatagtgcctcttccagtgaaatgttactgccgacaaaaatattttcccctctgtaaattgtgatgtagcgttctatatagcagatagatttccacacagatagatttgactgttagtgttataaacaagagaaggaaggaacaacagagaaagaagcaataaagaagaaggcaatcagaagaagcaatttcatcttaaacttaaactaccatccagagtagtctatggtcttgtatttactgggagcatgaaataagctcattctgtcatatgcagttgatcatttagcactgggatggagctgctttatttcacacagaaacaaaggactggaaaacattttgctcaacagcaggaggcctttgctgtttccacagtgatagatttcatttagataattgagcaggtgggatctcaagggctgaaaagtgaagtcttaaataagtgagggaatctgtccaagttcacagaatctaagaagggcagaggcaggatttaaacccctgtgggctcagattccacaaaccacgctcttaacctcactgggcactgcctttgggatacaatgatctctcagaagtatttttaaattatactgcaaccttgttagcattcctgtttctcagattttccatatatgaaacagttaatgtgggaaataatagtttgtggaatacagacaccataaacacactcttcttgtttacccacttttaaacaattataaaaccatgctcatagttagcaacaacctgagacgttctctagcccctctcccacccaaggaaaagaattccctcttcaactggaagttgcgacacctacttctagccgtggtgtgaacacatcaaatgcggagtaggcactaccctgccaagtgtccactcactgcagagagctccaattgctagaaaaacccggccaccttataagctcatttcactgctcctagttttgtcatttggagtaaggaagaatctccttctcctgctttcatatgacagtccattaaagaacagacagtcaccacgttcctctgagaatttctcttctacaggaaacaacatgtaattagttgtcacattctctggtttcatcagtctgtttccttgtcgccccccaatggacacccagtgagttgccaatgtctcttgtcaaaggtattaagacatcacagaactgggtacagggctcttgatatatcctggccttaagtctcaggttctccaacaaagctggcagcctgtggtatgccttctggggccagagagtgtggcatgatccgaggtcctgagtctctctctcaatgagcccatcatattggcttaaccaaagccagtggtcttcaggacacggaaaagggagtcccttaggctccaggtttttttcccttcagttcacactgggagaagggtcacagagctccagtgaaatctggtcctgttagatcatttgtggttggctgcagatgcacatgtgggcatgtgatagttttgatttagataaaaagcccacaactgagtggagtgttgaaacctcagggttatagactggtgtatctgtgagaaaaccacaacaagtatggtatttgaaggaccctaacattttcttttgccaagttattcattcagagcctaaaagttttcaaagtattgtccccaactgaaagaaaccctgtgataacttgaatttatttgtatagaagtaactctacagtcgatcagactagatgtcaaatgaccatctctacttagggtctgaattccaaggcatcagaaagtttgcccttacctataagaccttgctcttttagattcctgggatgatataaagaattcctgataattggaataactggaattcctgataattgagattcatgatagttggctgattaaaaggttatcctcagaagagtatttgaatttaagtgggagacccttaagctttcaagataaaaactggccaggcacggtggctcacgtctgtaatcctagcactctgggaggctgaggtgggaggattgcctgagctcaggagtttgagaccagcctgggcaacacggtgaaaccccatttctactaaaatacaaaacattagccaggtgtggtggcatgcccctgtagccccagctactcggtaggctgaggcaggagaattgcttgatcccgggaggaagaggttgcagcagtgagccgagattgagccactgcactccagcctaggcgacagagtgagactccatcttataaaacaaaagaaagaaacaaacaaaaaacaaaataataacaaccaaccagacaatcctactcaactagaatgactgaatcaggcatgtgcatgggatccattgcaccacatggaccctcgcctgttgtgtctacctgtaaggtcaactctgcctgtttcttatcctcttcccctcctcacagggaatgattctacttggccaaagcagggactcaccaaagctgtaggtaagatgaggtggtagacttctaagcattttacatgtgtttatgcaatctttcaaataacacaagtatccacaaggcagctgtgaagtcacctgactgttacacatgaggaaaaggggtagttaagtttagcatagtgccacacatatagtaaatgctcaacaaatataggtgttactggtttagaatgataatattttggcatgacttaagccaaagtccacctctagattatagcaacaaaggaaagttttgttttgcataaacacagtttcaaccgctggaaggactttagaaaaacaacttgtaggacattgtgaagcatcctttagctttcagctctccttgggcaggaagcccacagaccagtgagtctttagttttgctctctaggcttggcccttctcttcatttctgatgcttcgtccatacactgagaaggaccaatttccatattcttccatctaaattccagaatgtgttaatttcatagtgggtatatgtagccagtagatcaagtctcctaagagcttaccattatttagagttattttatacaaggaatgaaattctctttattccacaagtctggccagatgaccccagtcccttctaaggtagtatgcttttattctccccaaacacctgtttgattgagatgtcaaataggaaaggtaagtttcctaaaaaaaaaaagcttccaaatgagttccctgaggttctaggcttgggccttttctaactaaaattatgggcccagggtttgtgtatctatctgtctggggtcctgaggaggaacccagtggggacaaaaatccccatggcaacgtacttctaaaaaacacaggagccttacagcaagacctagctctggttcactgtgaatttgctaataattaactctagatctctgagcaggaacagtcacattagtagaaggcaggaattctatctatacacacaaactgctgagaattacaggtggaggcctactaggaaatagagcaggtttcaccagccttgactaggtgtctttgtctgagaccagcccattgattgcttgtggggagggagtccgtaggagggagagagtcgtgattgtattctgtggcgtctctttctgttcagactatggggagcaagataaaagtgttcccaaccatattagtgttctctgattcgtcgaatgtcggggtggaacgggacctgagagaccatggacctcaaaacacccactgagccttgctgggctcatctatctaggagacagtcgccatatatggatctacagcctttaagtgcacactgggcacgggatgtaccacatagaccctcgcctattgcaccacattgaggtgcactgtcagagtgaaatacacactgagtatcaaagactttgtatgaaaaagggaatggaaaatatctcactaataactatattatcacacattgaaaggacaatatttgggatatattgaaacaaataagatctattaaaatgaattgcactggtttctttaaaaaaatttttttttgctagaaaatataaagttacatttgtagcttacatgctatttctattgggtgtgctgttgtaacaagtacacattccctctcctcgaggttgtccctcagcatgacgctgactgatgttcatcaagacttactgtcacactggctagtgctgccaagccatctagactacaacttattctagattcaccctggagagatcttagagggcatatcttcttcacccagagaaggcatttatgccttattgaggcctcagtttacccagaggaaacagctcttccctatgaccctgagaggtgctggtgctactcaaggcacctgtgttctggtgcacctggccctttaactaaaagataatggggcaaaggagagggtggggagcaagtgtaaatacctcattgtggagcagaggcagctaccaccccatctgagctagggtggccctggctaactcattttgctccacccttgattaagcagatttttacaatgttcttgcttaaaaatctatttgattcactgaaaagtagttataagtggttacactaggaagatgaatactactcttctgcaccccgctgtgtgataaacctgcctgccctcaagaagcagatcctggctcttgctgggtggggttggtgccagcctacactagagcacccgcggtggcatgtggctaggattatcaaagggagattggaggcagctggtgtgtaccaggaagcgcaccaaaccagcaaagttctggcccctctattcagtagctgcaggatcctgggcaagccggtctcctgatcagtaaaatgggtataagagtgcctacttcagaagggtgctggtcaggcatggtggcttacacctgtgatcccagcactttgggaggttgaggcacgtggaccacttgaggtcaggagtttgagaccagtctggccaacatggtgaaaccccatctttactaaaaatacaaaaattaaccaggcttcatggtgcatgcctgtattcccagctactagggaggctgaggctgaagaatagcttgaaccctggaggcagaggttgtagtgagccgagatcacgccactgcactccagcctgggtgacagagagaaactccgtttaaaaaaaaaaaaaagaagaagaaggttgttatggggagtaaatgtgagaattctaacactatcaacagatgagagctcactattactgataaaatgtgtcccaggtgggagtcaagacgccagagttctaggttctttgcccctcatttagctctatggctgggtgcaagcccctgacctcttcagccttaggttccttatctacaaaatggattatgaagattcctctcagtgtgaagagttcatgatttccatgaccccaagcccttcaaataatagtgaaaatcaaggaaactgagcccagaaaggtcaaaccacttgtctgaagccgcatagctttggggcagcaggatcagagtagacatcctgcttcccagtccagggttttcctgctggagcacaggagcctccctgtttacccagtgaaatgagatgcaggaattcaagaggcaagagggagagagccccattgccttggacttggaggtaagggagtccatgcttctgaggtgagtcggtcagcggcaaagtcagccccatcaaaatctctctgtggacacaaattcttctggtatctccctcaactgttaactgcatatccccaatcattttcccttggcagctcaatttaactttggcctattgtgtcagcaaccttttttgtcaggcaggtgctgtctccttaatctcctgctactgcagtcacctggggcagccacccagctccgtcaggaacttgctaggaagaaactagccgtgcctggaaagtcgggcttttcgagttcagctcttgctaatttcagcagcttgccttctgatattttattcctctttacctggaattcattttgggccatctgatttgtttaatcatcacataaaagatcaacataccttatttattttttaaaggactgattctaatcggtgagcaaacacttttacactcgtcagctgctccttgggcagcctgggatcagcccacgttgcacattctctaagaagctttgtctccaaagcttagcgtgaaggctctgcttcagcccactgagtgagcgacagacatggagaagtttgcttttgtgagctcatcaggacaagaccttcattggttcccctttaaaagaaatggcagttgtttttccctggttggggcgacttgcatggttctgtgtacacagcttggagaacgggaaagaaaaatcagaacccacagtatctactccttgcaccttttagctaggagtattattcaaaatatttacctggtatggcttaagccctgaccaaccaaaaaagatagaagatgtaaattactggcgaggccacactaatacaaaccggtggaatctcaatgccgtccactgtcctgggagctttttatttatacccagcataatgtaacgtttactgagagctttctgaatgtcagacactgttttaaatgctttccaggagttaactcatttacttactgttgaaaactttattaggtaatgtttgggttgaattgtgccctcccaccccaaattcatacgttgaaatcccaacacccaggacctcagaacgtggtgttttttggaagtagggttattgcagatataattagttgagatgagattatgagggtgagccctatttcaatatgattggtgctcttataaaaaggggaaatttggacacagatacatgcatgcaggggcagcaccacacaacgatgaaagcagagatcgatggtgcttctgcaagccaagtaacactaaggatgaccagcacaccaccagaagctagcagacagccatggcacagattcttcctcacagtaccagaagagatccaaccctgctaaccgacactatgctttcagatttctgaaagcacctacttcagaagggtgctggtcaggcatggtggcttacacctgtgatcccagcactttgggaggttgaggcacgtggaccacttgaggtcaggagtttgagaccagtctggccaacatggcaaaaccccatccttactaaaaatacaaaaattaaccaggcgccatggtgcatgcctgtattcccagctactagggaggctgaggctgaagaatagcttgaacccgggaggcagaggttgtagtgagctgagatcgtgccactgcactccagcctgggtgacagagagaaactccgtttaaaaaaaaaaaaaagaaagttgttatggggagtaaatgtgagaattctaacactatcaacagatgagagttcactattactgataaaatgtgtcccaggtgggagtcaagacgccggagttctaggttctttgcacctcatttagctctatgactgggtgcaagcccctgacctcttcagccttaggttcgttatctacaaaatggattatgaagattcctctcagtgtgaagagttcatgatttccatgaccccaagcccttcaaataatagtgaaaatcaaggaaactgagcccagaaaggtcaaaccacttgtctaaagccgcacagctttggggcagcaggatcagagtagacatcctgcttcccagtccagggttttcctgctggagcacaggagcctccctgtttacccagtgaaatgagatgcaggaattcaagaggcaagagggagagagccccattgccttggacttggaggtaagggagtccatgcttctgaggtgagtcggcttccagcactatgagacaacacatttctgttgtttaagccacccagttgtggtactttgttatggcagccccagcaaaccagtacagggggacaatataattatcccattttacatgtggaaaccaaggcacaaagagattaagttcttccccaatgccccacagcgaacacttagcaggcagtttgctccagaatgtgccctcttaactacagtactaaaaataattctggctgggcatggtggctcacacctgtaatcccagcacttcggaaggctgatgcgagtggatcgcttgaggtcaggagttcaagaccagcctggccaacgtggcaaaaccctgtctctactaaaaatacaaaaattagctgggcatagtggcaggtgcctgtaatcctagctactcggaagtctgaggcaggagaatcgctagaactggggagatggaggttgcagtgagccgagattgtgagattgtgccactgcactccagcatgggtgacagactgagactttgcctcaggaaaaaaaaaaaaagttctgctttggcctaagcaatcagttgctttttcgttgaaacaatttttaatttcaacataatcctatcataatcagaaaagaataagtgtacactttaggggtgaatgatctttccctactgagcccatcttattctgctgcactgtgctagagcatcttgaccactgtgtatctacttataaccaaagacaaatcttctttccaacagaggctctggggaagagccacacagacaggtccttgaacctggtaatgagcaaatactataaggaagctggtagggttatagacacacagtgagcttttatcaggaggaaatatttacataatggggattttatactatgatgaccaaaacaaagcccctacagacattgaccacacagaaatgatccaattaacagatgtgttattttcttttttttttttttttttttttttttttttttttttttttgagacggagtctcgctctgtcgcccaggctggagtgcagtggcgcaatctcggctcactgcaagctccgcctcccgggttcacgccattctcctgcctcagcctcccaagtagctgggactacaggcgcccgccactacgcccggctaattttttgtatttttagtagagacggggtttcaccgttttagccgggatggtctcgatctcctgacctcgtgatccgcccgcctcggcctcccaaagtgctgggattacaggcgtgagccaccgcgcccggcccagatgtgttattttcaagaaacctctctccccagcctgccttccccttgaacaggaagtctgaggtggccaggtgtgcagggagaaagggacttctgaggaacatcatttctagcctattttattataacagcgtcctaagtgttctccatgtcatctgtcttgtcccctccaaactgctctgcagatttcagccagaactttccttctgctaatgcagatctaatcatacatctctcctgccaacagaccttccatagttcttcttagcctcagccttgttacctggcctcaaagaccatctttagaaattctgttctggttagcactcaaataacagacacccgaagaaaacagattcttgtgagacacagacactgtatctttcatatagaaaggtttggatacagagatttggctctgccccccaccacgggtctcacttctccctaggctgcacccttacgatttcagctacttgaatcccagttttccagtgaccaccaggcttcctcagtgcctttgctcttgcagtgggcttcttctgccaggaacatgctacccagaactcttctccttccatctctaccttcaagttcaggaatcaagtccagaggaattctttctagatccgcccagttgggttccaggccctctcatgcaggccgtggtccaagtgtccctcaggaccatggacttcatcacgcttgacatgaccatcattggtccatgtgcctgtcgtgtccacatacttcttggggacaaggggtatgtttcattcatctttgtattgccaagacctactctgttacataattggtgctcaattccaatgttgagagaatatatgagtgaacgaatgacacatagttcaacattacaaacaattagggcagagctctatgctctgtcatgagcatctgttctttaatgtccctggaaattcagggctccttgtgaatgagctagtgccatcctcagctctgtgccctcctctctcccccacctcttaattctctaaggactccagcatatttaaatgtgctccaatgtctatggctgaaaagtacccaccagtgtgggtagaaagaaagcgtgtagggtaagataaaaggagctaagcctaaaaagggttctggaaagtcagggagaaaaagtgtgaatgggaggatttgggaggtgtgagagtcacattcccagacagaggaacacagtccagagctttctcttctctttctctccactactaccaaatgctggatgttgccctgaatattcaggaccagtcccttccatgtagcacaaatgaacaagaaaataagatgggaattctgttttggttagctgccaaatagcagatgccccaagaaaacagattcttgtgagacacagatgctgtatctttcacatagaaagttttggatacggaaagcttaatggtaggaattctgcttttatttggggtcctctgtgtggaagaactgccctgaagacatccaggtacagcagaagcagccagatgctgctgcattaggaaaggccagctgtccccaagactgatgctgtgctgagatctgagtgtggttttttcctgcttgcatttgcagttacatggaactcgctgggccacttcttgtggtttgaagagtctgagcctggcacattaggagcaacagagtcaccatggggcccttctccctgtggacatatccttcttcttcagagatgccatttaggagacttcgaagtggcaaggcagctattccttgcccaaccactgcccccatctctaccatctgtgtctgtgtatagtgaccctcaactcccgtagttatgcaacagcagtggggacaaggagcaaaatatatgtctctagataagccccacactgaaaaatagcctttgagcaaagcagcccccaagttctttcccttaggtaagaaattctcaagagctctctacccttgtactgactgtgtaactcatgtgagcacaaacacgggtaagatatgaacagatccaaagcaaagcactctatcatcttactgggttcattctctgtcttcatttcatccagagaaagtaaaatggacaccatgccttgggaggacttgattttaagcagtgatgttgcaccaagacacaggtctggctgataagctctcttgcttggagggcaccactgagctaggaaattctgactggcaggttcctattggtcctgcaatctttaggtgaattgtcagaccctctgagagctaccccctaccacccagattgctgtaccccttaggctgggttctcacatcagtgcatgggagctactgctattgttgcacagatgttctctccgaacatctggagggcacagctgccgcatcatcctctcacagctatttcttagcacccaaatcaccctgcttgctcttcttgtcccatagaggtcatatgggctaattctgatgccttgtgattgggttgaaagacgagtgcatggagagctggattcttactctgaggcaagaatgcctttttttaaactggcatgttagattggcatgcatctcctttggtttttctgcttccctgcagcacggctctggttctgtccacggagcatctcccaagccaggcagagatggtggcaaagtggtgaattcctggctcaggaggtgtgtgtcaggcaagcttgatgctgccccgtggcatggagggttcaaataagcaaccagctcacaactgcccgagatgactggctcaggggctgctaggccatttgtcttctggtgtctgggagaacttgcttttttagaagagactttgaaggtttcattggtgtaataaatatttattagatgcctacaaagtgctgggctctcaggatgaagctgacatggttcctgccctcatgacctcatgacactctgtctataaaatcaggaaaggcctggtgcaggtcagtgaggggctgcctctctcactgagcgttggttacaaggccctgccttaccccaggttaggcctctgtgcctatctctctagcttgtttttccacttctccaaaaccttcctgctcttgcttctatcttgtcctgtgttccttgcagttttcccttcatccaccctttccattgcttctgccttctatcttgctggaaagtctgcccaaatggataaacagactacagtacatccatacaatggagtatcactcagtgctaaaacggagagaagctaccaagccctggaaaaacatggaggaagcttaaaagcatattgctaagtgaaagaagcagtcagaaaagactacattctgcatgattctgactacatgacatttcagaaaagacacaagtatagagacagtaaaaagatcagcagttgtcagagatttgcaggaaggaagggagggtgatttttagggaagtgaaactattctgtatgatactgtaatgatagatacaggtcattatacatttgttaaaactcatagaaccatacgacccaaaaagtaaaccctaatgtaaactctggacttgttagttaataatgatatatcaacatcggttcatcatgataaacataccacacgaacataagatgttattaatagaagaaactctgtgggggaaaacgggtatgtgggaactgtctgtactttctgttcaatttttctgtaagcctaagactgctgcaaaaaatgaagtttgttaaaaaaatcatctcaactcaccctgatgtcaccctggcacaggctgtggcagctcttcagagttccctgtctggcctctctctgccttccagtgcgatctagagatgttctcagctccatgccaaagcagcctccttgtctcccagttcactccaaggactggtctgtcatgtgaccgggccagcgtgttattgagccgccctcctgatcttcgatcccatgcctgaacaacactgtctccctggaattcctacggtctcaaatgagcctcggtgttggccttttaagttaatacgctgtctccatgctcatctcttattcaacatggccctgcccataagaccatttttaccaccactgatgccccaaacacaccccacccctgccattcccaatcacagatgagaaagattgaaaggagagaatcagaactgacagcaaaaagaggaaggggacctgagtatctcacctgtcgcctttgggcagctggacacctcacccacgcttcaggctggagccttcctcatctttattaggtgtcttagaggcaagtgccggaggtaaatcctcctctgcatttcctacactgacaaggagaatgctgtggctctacgcagtcatccttttacaacctggtgaaaggtacagcctactgttaataattgatctgcatattaaagtacagagtatttttgtaggcaaggcaattccttgctggaaaatgcaaggatacattttgtttcagttggttccaggggctggagcttcgggtcaggtgacaacttgctcacatgtgtctattgggtttggctgggagtagaagggacagagagagggcctcagtctttaacaggctctaagcaaaaaaatgaaaacgattttgaataaaaatatgaattctcaagtttccaggcaaagcagtccatcaactcttatgaaatatcggctctccctaaataaaataaaataaaataaaataaaataaaataaaataaaataaaataaaataaaataaaataaaataaaataaagagaaatattggcaatgataaaggccaggagaatggttcattctgaaactgtgtttagcagtcctgtactaaacctgcactccatgaaaggccaagctggcaagtttggactcaatcctataggctgtgaaaaggcagggaggtgacactaggctttccaggcaaggaggtgacaaatgtatatggtaaggtaaaaggacagggagtgaagagggaaaataacacaaagaaaaagcaaagggaataaaaaatagtcctattttatgaaaggttctcatgcatgcactgtcagcctgctcagaatctggcatcaatagagaagggtgtgttttgggatccataaggccaactaagactcttaaaggaattctccaaagcctgactccatcagccaggggattaggaggaaaacaaacatagggcaggggacaggtttggaccttcaatgagcacaagcaggacaagaaagttagctagtaggaactgcctccttgggaagattgctcctgcaggaatccccctcctctgtctcccaggctgctacatgaacattgccatgggcaggacactccagtgtgtttgcaaactgggctaggtgaaggctaatcaagaccttccccgaaggaatcgttctcaggagtgtcttaatcagttcaggctgctataataaagtgctttagacggagtggcttataaaccacataacttaatttctcacagttctggaggctggaagtctgagatcaggttgccagcatggtcaggttctggttagggctcttttctggactgcacactgctgacttcctgttgtaacctcacatggtggaaaaaggtgagagagctctctgggacccttttgtaagcgcactaatctcattcatgaagcctcccaaaggctccattatattgggggttaggatttcaacatatgaattttgaggggaacacaatattcagtcatttcagggtagagaggtgtaggttcttggaaaccactttctcctgtccccaacttttttattttattttaattctattttatttttaaatccaaagtttaatccaatttgccgaggaccttagctatgatgtggaatcaaaagtcacaagtgggagaatgggaaagtgaggccagatccacccgtgtgtttggctataggatttcggggaggtcacaggctcattgggagtgtctgaaactatgatcgttttctgtttttgttttttctttctctgaatcttaatcaactacaggttcaacccctttccttctggctgctcccccaggtctacccaagtgcggggttccccctgggaagtttccctcattgctcagatctgggagtgacccccgattggtgcttaggtgaatgactgaagctcagccagatgtcattcttgctggatttgcacaggtgccagcactcctcagctcagctgcttccatcactcacactagtccttcctcccacctgttcagtccttgaggctgatatagtaattgatggacctacaggcctaagtttgggtggaggctgaagatgacccaattaactggtagcatccccaagagaggaccctcaggctgtggctgagacccactccacaaagaagcctccccaaccagcgactgctgctcagatcatgcacctcagtatagtcgctgactgcagcagatctctgagaggatgagattcagcattttctccccacttgggtttgccaccctggatcagcaccatcccctgagggcatgccttggacatgcaattgcatgaggagaggtaagactggcaagcccaaggagtgatgcccatcctggttagagggaaaaccgcctctgatggctgtcctgacaaaggcagggcagtcctggagtattgtggcatggatgccgatggcaccattcctccagccagtccagcccttcaatctcttttacaatatctttcagcctccctcagattccccagcgacagggcagcatcctgggcagctccgttctacttcagccatttgctaacactgctgacacagttcatcatccttttgttgacacctcagtgccgctccgactgcaatgctgctggcaggaagattgagaaggcttgccccaggaagtctcccttttcctactccagcagtgctggccctgagccccagcagagtatcgcttagcaaagtcatcttccacttgccaaagtaaacaaatggagcactttataataacatgcccttgactctatggagcattgccccaattctgagtgaagctgcaaagctgagtgccttctgtggttcccatggcactggacaaaaggcaagcttctggggatgcctacagtagcctctgtttatttcattgactggatattggcatttccagtatcttctctttgcctctctctttcctcagatgtaagagtctgaaatcttgaccttagtttcttcgctctgctatttagcaaaccggacatttaatcttatttgatcttatgtgttgtagtttgtggttaagtaggagataccaatcttctaaacagaaaaatatgttagctgctgaaagaaatatatattttttttgtttccaccacttggtctttgttctttttctctctgctccttttccaccactagaaagcacttagtgtctgcttggtttgggtcataaaattgctcacttggactgtgttcacagcagctctgacagtgtttcagccacatgtcctcaactttctctcagtaagctgttagcagatgatctgcctacaatgagaagctgaaaccctccctacagccagctgatctgctctccgtgaagcctttgctcttaaaggacaaccacagcatgattaacaacagccaagttcaaaggagctgaagatggatttctggctctccggatccggctgctgagaaagcagggtcccttggcaggaagctcttgcagggcttctcctccgaagcaggaaagactagggaaaaatgcatagaaatgcagttctgagcttctcaccctcaccagaaggttacagaggctcatgcagttcccaaatctatgagctcttcttaattataaggaaatgctataggaggaatgcagatcagctgagtgagagacagaattcgatgcaggccctagttcttttctccccctgagccaggccgtgtaatgctgtggacattttcagttaagatattccagatgtggaagcggttagattgtgagatggaccatacatctgatcgaaaatcaaatgacattttctgaaagaaacagctgtgatctactttatgatgctacatggctgagaatattaataattctcactctctcctatgattatgacagaaatgtttccaaggtgccattttcacagctatcaatttaccttaaagggagtgaaatgtgggagaaattctttaaaagtttttaaaaacacgtcattcttcaaaaattggaaattgaaaaaaaaatcatcatctaaaatatatttcccccttaagttgtaccttttatagttctctaaataaaatctgattattaaatgagtactacagtaaccacataacctacttgatatccccaaataaagtgattgtaaatctgtagaggagagggaaaattaataatttatatatttcaatttccataacattttgttactcccttatcctccatagattccaaatttgcacccgaaggtattaaaaattcaaaaatgtatctattatcacaactaaatagaaactcaggactgagtgaatataaggaaaaaatgctctgataaactgtcataaagaaaagagtaggaaatggggttgatctcaatcttgtcccctccaaagtgtgggtgtgagttttagaaaatacaagatttcttttttgccagcacagtcctccaagccttgagtggctctgatgattgccaagaaagaagaggtagtgctggacaaagccgcacattgtaaccagttggttgtgtagagcatgttctttctggcatgtctcgcagagcctcatttcttcctttgtaaaccagggataaaaatacttcacagacttatcttgtggtttagaaataatatagttaacacgcctgtcctatacaccaagtatcaaagaggtggttgataaatggcagctctcctgataatcatgactttggacacaaaagcaaaccaattctatcgtggctacatgctgccccagaacctgtcctctgaaagccctgttgctctaggatgagagaaagttgctagtcactctcagaatacaaaaactctgagggcagactcaatctacctggtttgttgactgacaagtgctttgtccagcagtcagtgggagggctttcaattatatattcttcgtgaagggcactctaattttacttaatgtgaaactgcaacgaaatagagatactttcatggatatactccccaagaacaaggcttttcttaaccaagctgtcctggcagctgaggaaggagtatgggattgaaggaagagcctagggtttctgggtattggtatgaggtgtcaggacactagggatgtagtttcagtcctaacactaagaatggtaccatgtctttatatagggctttccaggtcagagagaccctacatacgcctggcctgactgaatcttcccctgtaagatatcaggccaaatagcaccagtcccattttataaatatccaacagtttaaagagttaacagactttgcgaagatcacacagatgaacggaggcagggttagaattcaaacccagatctttcctttacagagtacttcatctgcagattgttcatccttcttgctcaggactctattcataaggctctactttttccttccaatttttagttgtatggaactagaaaattatttggcttaacacacaagttctgtggtaaattctgtttctaccaagctgtgtaactttgggcaagtcacttaagcccccagaaccttaacatcttcattaaatggtgacaataaagatagtactcaaaattatgaagattagaagcaataatgcatgcagagttgttattatggtatatgcactggttctagcctttggagtaactcctccccctcccccttcacaataaatctttgatgttgaaattccaacaaatattgatgtctagtaagggatttgagggctatagcttttaaaacatagtatatttgcaaaaccacaacattcaagtgatgttgtgagagtacgtttattatttgtgtgtccaaggaaaatgatattttacccctttggtaagtgtaaagtaagaagacagccttaaggcctgtttggatgttatgaatatcaatgcatctaaagaaacacttgcaggacctgtctgtcctgctgtgacttcatcctacatgccaatgtcttttccattttctccatgaagacttaaaacaaaacaaccaatatttaccaggcacatcataattctcttagatttacagccattaacttggatagtaagcacaattgcaatctttggagcatctcagagatctcggtcaaatcctttaatatttttgcagatacttttagttctcttctcttctcttctcctctcctcttttcttctgttctttttctttcccttaatagggtgaggctgcttggttccagatatctggtctcaaattcccataaattggtaaagaaaaaagtatttagagacaggatgggatgaattcctttcactccttgaccccaaaacctctgttatcatggatattaatttttcagtttcagacttggcaatttatcaaacctattctggaagggaatctttactcaccaataccaacgtaagtagaatgcagacaaatgcataaagacctctagataaagagaggctaaattgttgtagttaggactagtgactctggagccaaattgtctgggatcacctaactagctgtgtgaccttggacaagttactcaagttctttatacttcagtttccttatctgtgagatggagatgataataagagaacctaccaattgcttcttacaggaaatttacatatttccattgagagatctttgatcaaattcagtgtggtgtccactagcatttggaaggataagtgcaatctagcagagaaaaaacatgacctttgagtcaagagacctgagtcaagtcctctacctgattcacggatcaaaccgttcagcacagtattcaaggctttttacaatttgacaccaacctacattttcagccatgcttgctgtcacttcttctccttgtgatttggtcatcaaactatttgcaattgcccaaaatatcagggatgtacaacttaccctcagtccgtccgtactgtctctcagaatcccctccctactctctgcctacttgttcattaactgctcccccttctggccatggctgcattttgtctgtctcctccactagactgtgcttagggagaccagagaatactcaccttttcatattggtgcctggtatacagactggcacatagtgggtgagcaacagctatttttaagtaactaaaagattaaattagtgtcttttagttaagtctcttaagaatggtgaccataatatgtctcctttctactttaaaaaaatatgtgagggcatctgaaagtaaagtaataatatactttattgccagtaatataatgactcactaaagacatgaatgtaatttagccttaggccattcttacattcctttgaaagcctggaaaaacgttcaagtggcaattacttgatgtgtccctgaaaataccagtgcaaattcctttgttaatagagtatctgtcctctgacaatcaaatagggacgtgttgcaaagtgagccccccattggccttgttcttagacaggttgtaaatccctgaagacttctcatagtcagctgtgtctgggtaaatcttgttcccataggacactggggagaagagaatgtctgagctggccatttcctccaactggctctgaaaggaacaccaattaccagtccaccttgttgacatgttacctcaaatgctttcttgtttgagaacaattctttcagaaagactgagctgtccttttctataggcagtagagaagtggatggattcttatgccatagaacttaggatcttggcaaaatatggctaaactcctttaggtacctttaaatatctggttatgccaagggtgatagtggctacagcagatgtcttgctcagcagaacattgtgttgagtgtgtaattagaaagaccaactggatggaagaaaagagacaaggaaccaagatttcttgagctttctatcatggccagggaaagatagttggaattattaccctgaatttgaaatcatcacaggaaggcagacatcattctttgtgccagaactttggacccaatgtcattcttcctatctgtggcctgaaggagaggggtagagaaacctacttaatgaaactccagtggttggaggtgttaatacagatctgatgggtctctgtgctcatcgaagactgctttgctagtaacttgtcaaacatccattacaaagcaataattcataggaaagaagcaaagtattaataagaattatttcttgaatatggtttactagtagcaaagctccccttttcatttagtgggaaagcatgagaattttgagccattaccaaaagctcagcattgctatactaaatatttaggtagttgagctttccctcattgaaccattctctttgtttggtaaccttggtgttgcaaatcaagatcgagaaagtcggattgattttttgagggtcacagtagtcaccaaaaaacaaaaacaaaaacaaacccaacaacaaaaacaacacagctctaatttttattggtggtaacaagaaaaaatcattgtgggagggacatgtgtgtttcttagaaatattgttgtatgggacaatgttttcatggtacttaaaggaatgtgtatttcaaaggctaattgtgtgaaacttttctctcaaaagaagatcagaatgttgcgccgttgtattccagcctgggtgacaagagtaaaatttctgtctcaaaaaaaaaaataataaataaaatgaaaaaaaaaacataaaaacacacacaagaagatcagaatgtaatgttatcttactcttgagttggaaagtatcctggcctgagagtatataatactcaagtgagaagttgagatgtttagctatgccttgcatcttatgatgaggatggggatgggccgctttcctaagggagcagggctttgggatttctaataagcagcagagggtacttacaggatgccttaagagctgtgctgaagattcagccttagtgtctgggttatttagcattattcttcaaagacactcctaccttaccaatcctattaccccagtggaataatgcaatctaattccagtttcaaaggatttcctggtagccataaagaacataattctaagaaatagaaaaaatacatttgtgagaatcaaaagattttttaaacaacctggaagaatcttcacaaattccaaagactcaacccaccagccttacacatgacaatgctagcagtagaagaaagaccttaaattacccactgaaaaagatcatgtcttatgcatctctatatgtcgactttctagtaaggcacctgatacaacatggggtctcaataaatattgacttgaattcaagtgatactcaaagatgataacatcacatctttggagacatatacttaatcaccctttgaagaaagtgacacaaatataataagtttcctgacacccttcttccccaggacacttggttatctattaaaggattttcctggtgagagagcacttacaaatgctaaaggctgccagagagttcattatgtgtttgaatttctgtatgtgtgtaaaatcgggaaacatgttatttattcatactaacttggactttattaaatgagaaattcagccaagattcacaggaaatatatgtaatatatatataaaatataagataaaaatcttaaaaccggaaaggacttatgaagatgctagatttctgggaagaagttccaatcttcaactatgctaaaagataagaggtgggggaggagggagaaggaaaattctagataataccaaactccaagacctacagttagtccatagccagaaacttggaagacatgttatgactaacattacccatgtcactgtaaaccacaattattagccaatatattatttgctgttggcaacaaaaccaaattgttggcttcttcaaagaaagtaagtagacagttcattctttgcctaaaaactgttcggctatcctctgccaaatagaaccatttcaaacaagcacagcatcccttctatatctgtatgaaaattctcaactctcagaaaacaatgaaattggatgttagaagactgggcagtggtgaactgaatcctggaacacacatctagcaagtaaggactatgggggttgggctgggagaaagaaaaagcccctaaagaagaacataccaaagatgatgactttttatgttctctattttgcctccaggagaataggcaatggaagaaaagaagatcctatctcagtgcagaaaactacatcagtagcattcctgttagaggctgatattgaactaggacatgtcattctgccctccagctgtaggccaggacatttagagcccagtacatattgaacaggtttaagaacacattacatatgctcagtgttcaaaaatattgggtctaagtagattgatttttattcctagacgagtaatcatgaaaaataagtagcttagacagtgaacaaaattgtctaacaagaaaactgaaacatcatcttaatgtcaatgtcagaaaactgtttatcatcttcaactgaaatagaaaatactgtggaaaaggacaggtagccattatgagataaaagtaaggaaggaaaagagtgctgggttagattaaaaggggttgtagaggagccagaaatgaaataatagtactaatttgtccactgaaggcagtaaggggtaaaactgacactatagtaaacagaatcaggcacttctcaaaatgtagatgacctacattatacaccctaaaaggataaatgggataaaaggtggcgaatcttaagatattaaaattaaaaagtaaaaaaatgagaaatttatggtataaaaagacaatagttatggacacagaaatcagataaccatagaactgctcaggaatgtattgtaaaggattatgttgctgaacagatcacataattcacaaaagagaagtcatataatataaaatatttactgacagtaacatgaataaaaaatgttaaattattcttaccaatactgaggaaaggttggaaggaagtaaaaatggattaaatttcttttgatggggttattcaaagataacatttcattttgaagttgattagaaaactgtatggtcatgtctttgactttgctaagtataagatatggatagaaatgtcttggaaactttaagtgtaaccacttgtagaaataaaaagaagggtgacgagcttctcaattattgaaaaaaattaaaagtaaacccaaatcatagtccatatggcaaaagagagatcaaacagaaaagacaagaaagtatgaaaattatttttctaaaaaaagaaagaagatcaaattaatataattttgactgtcataactgatgtaaaattctaaatgagggaaaaatacttccatagtcaaatacattttagaaatactgggttaaactcagttgaactcatctctttgttgcagatctcatcttaatatgttaatatgaattaagaatgcctgggagagagaattttcatttgtcgcatttcccaagtttattttattagcttccacataacacacttttaaaaatgttatgtaagaggtgttcttcttgaaattgatattaagacaggacgctcactattatcattgttatttagtattagaagttacgatcaatgctgtaagacaccaaataaaaattagatgcaatttttggaaggagaacaattatcattatttaaagacaccatgattataaacttttataattaactatgaacacttataattaattataatcagttaaataatcagataaaaagtaaatatacatcattaatatttatcctgtagtccagtaataccagagaggagataatggaagaaaaatccattcataattaaaagctaaaattataaaagaaaaaagaataccccgtcaataaatatgcaggacctatatgagtaagactataaaggcttaaaaagaagtataaaagaattgagtaagtgggaaaacattcaatgcttcttgatgggctgactcaatattaaaaagaatgtctgttctcctgatttaacacattcccaatcaaattaccaatgggagattgtgtgtgtgtgtgtgtgtgtgtgtgtgtatagagaagtcatgtaatataaaatatttactgacagcaacttgaataaaaacatcttattctccaaaaactgaaaaatggttggaagaaacacacatacacatatatacatgtatttacacacatgcatatacacacacgtatgcttttgtgacttttgaaattattttagagtttacttgggaggacgcattggcaagaataggtaaatcaattttgaaaatgaaaagtgatgagaggatgcatgcattaccagtttagacgtttcattaaactcaaaaccagtgtggtgttggcccaagaattgatatagcaataaaactaattagattattctggaatagacggtatgctatgaataagaacttaatatacactgaagcattgcttgtccagtgaaaagggatgagttattcaacacatcctctgcccaacatcattgtctttctctcggactgccgcagcctccccagtggcctcctgctcacacttgaccaccaccctgccctgctccttcacacacccacgcgcgcgcacacacacacacacacacacacacactccatgttctggggaaagaggacctttaacatttaggacactgaacaacactttcacacatactgtttcctctctctaaattcatgttgccattttccttcattctcagctagaaggttgtttccttccagaagccttcccttatcccccaggtccagatcaggtacttcttcccacctgtatttcctcttgcatagcttgtagtatactattttataatgacctggttttgtttgtctatcccctcattaaattgtaatctctaagtggcaaaaccacctgcaccttgtttttctgtcttacctcttgtgtctcgcttagtgctgaacacaaaacactcaataaggatgtgttgaatcaacaactaaactgtaatcacaaatgaaaaaaatgaacaaacttcaagccacaaaaacttatttatttgtcaaaaatactttaaacaaaattaaaagaccaacatcaaactggggaaatatttataacaagtattatggaaaatagattgctatctttaagatgaaaagggtttattttttaaaaattaagaatttttttacatctattaatgataaaaaaattaagaaaatgttgagagtcaaatagaaatcttaataattaacataaaaaggaaatcaataaaagaagtatgaagggtagtgagtgtatgaaaaaattaattatacctagtagtcaaagaaatgaaaatgaatattattttaaacttaacaaattagcaaaatcagtacatccatatgacggaatgttatacaagcttaaaaaacaagttttcaggaatgatttattgctacttacatacacatatattattgactatcatataacactaagtagaaagaatttgaaaaatatgtatacaatctattcctgattctttttaaaaatgagagaggaaaatatttcaccatgtatcagtgttttttttttcttctgggtgatgagatcaagatgataccgattttctttatttcattctagaatgccaaaaaaattataaaaattttaagcctacataagaatccattttcctaacctttcagcaaatttagaaatctattctgtaatatgctggacagctggcatttatattcttatgtaaagttactttcttccatctctttaatgtaccaaatgaaataagcctttcttagatttcacttatcaaagaaatgactacattttttctggggcaaaatgagtagagaggtagtcaacaaaaataaaaaaaagccttcaaagaaatccaaagagtacttaagacccactgttcagaactgagcagtcctggaggataaaccaactagctttatcactggaaagaattcatggagatgaaataccaagtagatgttaatgaaaattatgtctatggaattcctaaacagaggttaattaaaactcctttctcatcttctgaagtatgtgccagagatcccacagtattaaaagtcattggggagtgtcaatcaagctgtgtggcacaatattcatttccacgatccagaaggaaaacgtattcactgtgccatgatggtatatgggcttgggccaccttctagcctataatctaaaaagcatgtgaggtaagctaccatcattgtttatactcttatcaactgccttaacctctgtataagtctataggcatctactctggcctcccacaatattctcaaaagagtagcctgagtggttcttttaaaaactacgcacgagatcatgccatccctccacttcaaatgccgaaaaggcttcctcttgctccttgagagcttggggactggtctctctcattctccagcttcttctcatgttttattcagcttggctcatacacactgggtttcttcatttccctacattggcatgctccctcccacctcagtgcctttgcaggtactgagaaaattttaccttcccattttgatcttaaatcagtcatcactttgacagggttattctcctacagaataatgtctctctcctttgttgtccttaccatacttataaatgcaattgaatttgattgagatctctttcctcaatatattagaagctctgtgtaggcagaaaccactcagctcactattattcccttagcctccagcacagtgtgccttagggtttcagagatctttgttttatgaattttgcagaatcattcccaaagatgactatgatatattttaatgtgaacttctgtacaagactttcaatgacacacagttccttctataactaatctcagtaaattcatgcaaacttttctcacagagtcaggagagaagaggagagaattcagtgcaagggtagatcttcccagatcacaagtagagtcctgtctgggcagcgaagctcagtctagagttatttagctcattatgctaaattatatccaagattttctcattctacagaaagaatgtggtttgtgtaaactacttgcatggttagtatccatcagagacaaactctaaccagagatctcttcctctttttttttgagacaggtctaactctgttatccaggctggagtgcagtggcgtgattatgactcactgcagccttgaccttacaggttcaagtgattctctcccctcagtgcccccaagtagctaggacaacaggtgcgtgacaccatgctcgtctaattttttaatttttttgtagagacagcatttcgctatgttgcccaggctggtctcaaactacttgggtgcaagcaatccacctgcctcagcctcccaaagtgctgggactacaggcatgagccactgcgctcatcctaactagagatattggctctaagttactgcaggataatttctatacaaagaaggattttagttttgttcttattccaacacaccggaaagcttaactgcggttacaattaaggtttaaagaattacggaatgcatttgtagccagtttagagcactttgcaaaagtcaatgttttcttttcctgtagtccatttttctctcccctaaatcccctgcactttctcaatttctcccccactttcacacttctgactttgtttattccttgctatagtcaaaaggtacaatggggcatcattaggaagaggtgatgtgaccaacctggaacaccatgttccagcctagtcactgcacttcaaggactcacaagacctgaagagacagtgatggaggcataaaatgttcaagaggatgaggaagtgggggttgtttaaggacaaatcatgaagatttgaactattctgtctgcaaagataaaagctataacagaatatggttaatacgaagacagatagggacaggataaatagacttacttcccaataccataataatgtaaaatcccttgtaacagaaagagttacaaaagggggagaggatctgctatataacctgatagttaacttaagatacttgcttattgatgttattcacaagtacgctaaataagggaaattttttaagaaatctgtatatgacttgataacagattcatgatgtagtattaatattgagtaaatattcatgaattaaccaaatgttcagataaattcatgtataatatgataccagattcataaaatattaatgtaatattgactgacatattaataggttaaacagatttgaggataaattaatttgtgttattccagcaaatacttggcattaagagagtctagttttattgaaacacagccacattcattcacctatgcattgtctatggctgcttttgtgtgacaagagcagagttgaggaattgtgacagaggctatatggcccaaaaagcctagaaatatttactatctggctctttatgaaaagtattgctgactccggtctagaacacattaggaacatccttaatatttgaggtccacattaagtagatgaatataagttcttctacataatacctcttcgtaggtatacaattggccagggcagccatttctgataatcatgtagagtctgaaaaaatacccattaaccagtcatctgatcatcatgtctttggagattcagcaatcaagttaaagatacttcctgaattttagaaagctggtgagttagcaggtttttggttatatttagctgtttttgatgcctttcaattctgggttccccacctactaagaaacatgaaattgttgggaaatgaaactctgagtacaaaatgatgtcatcagattagttgaaattaaggtctggggcttctgatttttagaacataataccatactttcctgtacaccaaagagattagcagtgctttactcagaaagaaaccaaaatcatagttttcacaaatagggacttcccttttttccccccagtgaagtcccctggtatgaaattaatttgtatacatgtactataacatgactttggtaatcatgtcagttatactgcctaaatgaaaataataatatagaagcctattccattgtttggacactactgttcccattttgcataaccaagcatgtaaaacattgaatcccctagcgaatttaaagtttctctcaaaactgagggtgggaggaagtcatagcagttcagggtcaagatctaaattttgaggcatcataattaagctcttcaagtacagggctctggctcagcagccaagtccaagtatgagattcattaaagcatttcattttcaactgtcattaacagtgatcagcgtcattcccctactcccaatgaatgcttgccattggttgggcaaattcacccacaaagagaaagtctcaacagcagctgcctgcttacacagaagaaagattccagagtagcttaatgctttgccactgaataatgccctagctgcttgaataatcagagctacctatcacattgtacaataatcatatcctatctaaaattcattgcttccaaaggaatatatcagtgaaaaatgtcctgatcaacgaccactttgtaaaaggagatccccatgaaataccattgtgggaagttttacatttgtacatggatttgccaagtctttatataatcggtcttagtgacaacacagcgagaatccataagcatagcttatgcttcagctgatgatttcccaaagccacatgtaatttctactttaaaagaaatccacaaccttttaggttatcacacttggattatgcctttgatttcaaagcattccctttacattattccctttacattatggattctcaccttaacaatacaactcaagatatttggagctcatgttactgctgtttctttagctatctgagtttttttttctgggaatttcattattaaattcttattacacactttgctcacaaatgaacgtttcctttctataccactaatcacaataatatttgaggaattagaagtaaatagacagaaccaaaactgaacaatgaacaataacaagcatctaaacctcactgttccttttggtgcagccaccccagacaagtggcacacagctactcaagtctgagggcccctccatgtggctagaagaagccaggcatcttgcttttgtaattgtttggccttccaagtggtttagtgagtcacaaaacccatatcatttcatctctcacaaatggaaacaggtatgctttgttgggctggttttcagtcctcagtgcctggggcccagttcctgcagagcacagctcccggtcctggaggcctttgtccaggctgaggtgtgtctgcagactctcttctccagcaggtagctatgcgttgaccggcaatgtgattttcctcagcacatttccagccttccccgttgtgcctcttgctaatggtgctgatatatttctgagcttttccatttgccttggttttgctagaggaaaaacaggtgcttctaccctttccttatttctgggaattgtacactgcccagctggctctggtttgcctgctggcatcaaatgtgggacaaatggagaaagtatattctgctaatctcctagcttcatctcccttgaggagttttcctccatgcttatcagatctgggttccaaaggctcataacctagctcttcagatagtatttggcaaggacagtggccctgaaactgtgccatttgtgggtgaatgtacaaagcaccaaatcaacaaactatttgtcatcattccattgcctttcctccatgtgttacgcactgctcgaaccatccaaatacaaagcagtgccacaggaaaaggggcaaacgcattgaggatcaactatagatgagaagtttctcaaccattgtcttcctccaccctcaaaagggcctagaatgcaggcattgatttctccattgttacaaagatagagcctgaggttcaagagaagtaaaacttccctggatcacccaatttctcagtggtacaggcttgaagcaaacacagcaaaaagaagaaatgtattcctcttgtattcagagatgtgtaacagtgggagaaatatcacatagctgactccatcttgcttctaacctcacaggctaactgcctttgctcattcctatacataggccaagctaatgatggaaagaatttagattatagtttaacttcagaactaatgaccatctctcttttgaaacagacccctgaggagattagaaagtatgcacacaaataacaatgccatcttaaaaatttatagaaacaaggtcaatctggaaaatagttgaccatgaacaaagaagttttgcaacctcctagatccctgctgatgcccagatgcctgtggtcaccagtcaactgtggaccttaaccccctacctattcccccttcccctaacataaaaggagcctaacaatctatcaacttaagatggttctttagtacatcagtctgccatcttctaggattgctggctccctgaaaaaaagtcatcttccttgccccaatatcttgtcttattggctgtcatgtggtaagcagttaagagctttggacttgactatagaaggtaaattcttttataagggctgccaaccagaagcatgttgctggtttgttggtgaagtacaagaagggtgtgaaatagaactgagtggtcaaggatgttttagggcctttgaggctcataaatttctactgagctcagactcaacacttgccccacatccttagcattttaccctgttgactgtacatgtgttggtgtcccccagtaaatcatgaactcttggtgaggatgatagtaattactcccatgaattgtgtgcttccttggtgccaagtgttgtacataccttgtcttgtctttttctcccagcaaccctggaatgtatgttttagtagcctcattgtacagatgaaaaagtgagacagagaggtaactcacttgctccacagcttcactcctggaaaattagagctgagatctatgttgtctgtctgattctagcaaaagttctcagttgcaagatgtacaaaagaccctcacccctagggcaagttctgggtccttggaagagtggaatccattgctatttagaaatagaagtaagggccgggcacggtggcgcatgcctgtaattgcagcactttgggaggctgaggcaggtggataggcaggagttcgagaccagcttggtcaacatggtgaaatcctgtctctactaaaaaaaaaaaaaaaaaaaaaaaaattagctgggcttggtgacgcacatctgttccagctactcaggaggctgaggcaagagaatcgcttgaacgcaggaggcagaggttgcagtgagccgagattgcgccactgcactgcagcctgggtgacagaaaaagactctgtctcaaaaaaaaacaaaagggaaaagaaaaaaaaaagaaatagaagtaagaactctggaactgaggactttcttttcacttagctggatatcaacaaggcttctggaaattgtagtattacacaggcaccagaagaagctactataaggtgctattggaggttcccacaggctctcaaaatgtttccctcacctagatcacagtgacatttccaccaacagagacttgaggttgaaccaagtgctcatttattgaactatagtgggctgaatggtttattgagttctttggtatattctcaggaaggttcagtttggaggaggaaggggtctgacagaagaaaatagacaacaaagtgggagggggacaagaaaaggagttgggggcttatgtggggcatcttagtagagtaagcagaggtaaaagaaattcttcctgaaacacagtaggatgacagtggagaagtgaaataagcaggtaaacttattccttgggcctagcataccactctgtgtgatcctctagatgaaatacatacaagtggtcattagtgtgtgatgaccatggacaacctgggacataggtcaacaccaaagacagtgtgctgccttatagttttgagtccagacctatataggtaattagaaaactttcatttctttaggagacatggacaatgatttggtttggcactagttaggctgagaaggacttggtttttaaccatctgttatctgtgattatttgaaatattcagtttcaaaagtttaacccacttattgaacattccaattccaaagacactgttaggcactggggcagggtaaacaaaggagaataagtcatagtcctgccctcaggtagcttacagcatagtggtcttgaccaagaagtctatgtttgacacaaggtgataaatgaaggtggtagggtaatgtcatgagtgtagtaagtacattctagaattcccctttaggtgacaggttttgccttccctcatcctcttcccaagtcttagcaagcctctagctccactgactgatgtttaactccacgtatccttctggacatccaacccatgcaatccttttctgttgagaaacttctgaggcctgtgatgacctgagacaaatgcagagaggaacttatacctccagcctcctgaaagtgggtgtacatgccaacactgggggcctaagtgaaccccaacattcccaagttcctgcagaagactgaacccatgcaggcttagatcctaggactcttaaacctgatacttaactctgtctagattatttgtaaactcactgctgaaagtacatgcccaccaatacccagatgtgtgcatcttgtgtgatttcatctgttcttttatacttttctctgaaaatactgctgttcatccctaaatagccacattaaatatacacttgagtttagaaaggaagctccagggccactaaagagtcactgctactactactgggggatcagcaatagtctgtaggctccggcttcacacagtcatagcatcttgcgtgtgagataactttaaaagggtatttagcccatattaatatatatggtatatttttgtaaaggctggaggacaggagagggggacatttttatgaatgctcttttatatctttgaattttaaatgaactaaatgaattttaaaccatgcataaaaataaataaaaatttaaaagtcacagatatgaacactattatggtttcaatgatgtcctttgaaaagtaaaataagaaaagttgctaagagaaaaataaaactcattgaatcaaaccctgagggaggagatagactgattcctgtgatcacataactgccattaattgctctgatctttaaatgacttgattttagcttaggacatacctatatcaaatatatattcacccttactttctgctaaatatttaaccaaaatcatcccaataaagaagaaacttacattattggtttgaagataaatttttttaaatatttagctttttgtaggattctgagttatttggagaatatgcaaagatttgaaatagctttcaaactttaattcactgatgttgccactgcaatcttccaaaattgagtatagtttactgcaactatatgtatggatttctgttttctttgcagttttaaatttggaagtcaaccgtaagaaatacctgacacatatcatataatattttaaaataacatttttttgaaaattaaagttgaataaacaaattgatgatttgattaggtaaattcaacacttccaatgaacgcatgttaatctctgttgaaaattaccctatggaaactggagcaaaaaaattgcatcttatataattaaaatatataactagtttaaacatataatatagaagacaaatcatcacaattactgtctttatagccattgctgaatagttcacttacttaagttaaaatcttaatgcatttccttatataaacttcaattctgtaaatcccttgttgttactatcattaggaaggaaggaaggtctgttactttcacgctagttattgagaaaccaagtaacttgagagaagacatttttgaaggtagatatgcagtgaaaagcagagaagacagaatgaaatattgtgtttcctaggcttatttcgcttctactaataaaacactggaaagaagccaccagaattttaaagcaaataatgtggtaacaaataaattaatatgactctctttttttaattttttttttttaagtttccaaaggccagcctcagatggccgtggggagcaattagaatttgcttcatggcttgttgaataactttggtttcttcagtctttgataagtggcaggtgggtgggtacaacacagaaactatgaatagtaggcagaaagagtttgaggaaaagagagggcatttcatcaagactcctctggtattggcaactttcaccagccagtgccctgttggcggcggggtggggggtggtttatcctcccaccttggcagatggcaggtggtttagatgtgaggccttcctggaggggggttggatcattcagcctctagattatgccatctccccaccagtccaactcccggaagcccggcccagttttagtgtctcctagtggtaccttggggtttttgcaggagaaacaagtctacttctgaaggtggcagcttcaattacatagaaaagtggcacaacatagttactaggaacccagagctgtacagatggattcagttcaaaacctggctttactacttaccagctgtatgatcttgggcatatgacttaacctctttttttgcctcagtttcctcatctataaaatgataataagagtacacactttttattataaagggtggctggaaggactaaatgagttaaaacatgaaattcttaaaacaaggccttgcatacagtcagtgcccactaaatgcttgcgattatattagcacttatatggagaaactgatcaactgtagaaagccccatgtaaatgtctgacagcaggaaggccttggtaaacacagccaaagtgtcaaaacactcagaaaagagataaactagtaatgcgaatgtgacctttccagcacttacgaaaagcacagtaatcaaaaacaacaaaagccatcagaatagtcttacgagacaggatgaaatttttatggttaagaggcaaaagcagcaaacagaagtttctccccaggcagggatttgttttgttctgcttaaacaagttaaggttaaaattcctaatgtttttaaatagcactagatattattctgttttagttcaaaacaaggggtctaaaacaagggtagggcaggaacaatcatcttgagcaggactaggttttccagcactttcgctggtcccctccatctgaaagccatgctggccatacctccaaattccatcctgaatccaacacctcttccaccttgcttgctgtcaccttggcatgatccaccctcccctcttgcttgtacttccgatcagcctcctacaaaccctctgctttcagtcttcaagccattctccacacagaagctgggaagagctctcaaaggcaatgccaaccatgatcctaccctgctgaaaacctcccaatgagttaggatgttaggctctcaaagcacttaacagcctaactccatcccatgacctcgggccctccttgctcttttcccacctttccctcattgcttcttacctcgggtccagccacaatggtctcatttctgtttcctgaacaactcagaccttttccagtcttaggacttttgctgttgttctttctgcctgaagccttctttctgccagctctcggcatgcttttctttttagtactgatgtgctagcttgaagggcacctcctcagacagtgcaacttgtacaagctattgaaagcagccttcagcaaactctattcccttcagttcattgcatttttttcatagtactgactaatttattgggttttatttattgtttgtttttagtgtggatatctgtttcctcttactggaatctaaactacactagagtaggaacttcatccttctatctccagctcctataatgggtccttggaacaaagcagaacctccataaacattagttgagtgaataaagaaattctgatgcccatgatagttgactaacaggaggcctctgtccatcgttctcccctgcgatcttttttcttattttctcctaatcccacaatctcagcaccccagaaaacaaaatgctacatcaccttctgtcccccagcctcttccatcaaatctaatacaaaaacctggtttctttttgttattaatacaaccttctgaggatcggtgtatcagacttggctggaccctggataactgattccagaatcattctcaaaatcacagattcttccacatttaggatgacttggaattggctttttccaaatccaaatttatgagtaccccagcctactctgatactaagtagcttctgcaaccaaaatgatttccagggtctgagagggtgttacacagcctagttatttcttggctaatttaccttggtaaagcctacccaatgacagtccctggagactactgctgtaattatatttttaataagggtgtgaacaggaacagagttaattggctttaaaatggctgagacaagaaagcaagtcttggttaactaaagattaacatagcaattgggaaatctaatatataggtggcaggaaagcttaacctttatctttcagtctcataattaattagcaagcttctggcaatgtgatttctaaattgcacacagaaaattttagtgatgaggctactgagtgtgaggtctctctatagaagtagcaaacttaaattatgctcaaaatcatgttttttaaagaacagaatgatgaaattgctactcaacaaaaatatagtttgatggttttctgggccatgagactctaaaacaaggcaaaagaagaaatacaaataagtaattaagatttggatcatagctgaccagtagtagctcttagccctggatgcacattataaacctggagaactgtaaataaatacgaatgtccaggccccttcccagaatattgattcagtgagtctatagttgtttctaaagctccctaggtgattctcacgtgcaatcagtgtggagcaacactgtttaagaggcttgctttttgctattgctaaagcttttggaaattgttttaaatcagtaatggattttgagacagagaaaagaaaacccaaccatttgggaatggtacaaattgacctatctttttgtctaaagaggctgtattgccaagactctggctttttccccgcactgtccttcagaagaacttccgtccccacccctagtctcaccgtgggcagtgaacccagaagctcccaacacatataaaggattctttaaaatgtagctgttggccgggtgcaatggctcatgcctgtaatcccagcactttgggaggccaaggcgggcagatcaggaggtcaagagatcgagaccatcctggccaacatggtgaaaccccatctctactaaaaatacaaaaattagccgggcttggtggcgcgtgcctgtagtcccagctactcgggaggctgaggcaggagactagcttgaacccgggaggcagaggttgcggtgagccgagatcgcgccactgcactccagcctggagacagagcaagactccatccaaaagaaaaaaaaaaagcagctgtttaaaatgctgggctttctcctctttttttcaggggtgtagcaaaaagctgatatcctttcagtgaacaagagcttcagagaagggaaatcagaacagccgtaaagtgtggggctaggagcagtggaatagcaaccagagtcttcacttcccagatgttagagtggataaactataaatatgcaaggccaaacttcactagactgagagctcccaggcatcagggacggggctctcgggaccactgtgactgcctatgggtcattgacactcagataatcacagtgttggcagcttagggaaaccagtcatcttcacctactgatctgtgacactgattcattcatgtaagaaataacattctaacaccaacaggagagtgggtagactcactttgggagtttaataaggtatgtggaattcagtagctggaaattctaatttcacctccctgagaattctcatttcaccttcatcaccagctagtctcctggcccaaggcaagtaattaaactccatttctcaatttgtaaagttggagaggtgagggaagattgcagatgcttataaaatagctactgtgggcactattaggcatgataataaagcccttggcaatgattacaaaaagcctggtagaaacaagctcctgtgagatgcccattgtgccccacttagctaggatccactataggacacccccaaagtacacagaggacaagagtaggcagctggttacaaaggctttcagccacatcatccaagtagacagaatcaccacgaggaattatctgtgaatttaaaagactacatacaaatgtgcatgtatatacagtttctacaaattaaaggtcacactcttggttgtccatttaatctcctttaaaagattacttctttcattttatgtcccatgattatgatataaaaatcttggtttttgctcagtgattctcaactctgacttcacattagaatattctgggaaattgagacagaaacaaaaacaaaacaaaatcaatcagaaacaccactgagaccagtccccagtcttaaactaattaaatggaagctctggagtggggctgaggcatttgtaatttttaaaagcttctcaggtgattctgatgtaaagctcagatctggagccactggattaagccaactgttcttttccacatcacgcacccccgaacccatgtacatttccactgccacaccactgtgcattttttcttatgtgaggtggctctctccttctctccttgtgtctttaggcttccagccctcaatgcccattttctactttgtctttcttaatataccttagaggttatgggcatgctgccctccagaattgcaaaactttgtttgcatcatttatgtaacacttagaaaatgttctttacatgctaccggtcttttatgtttctgtccaccttcccaactaggaactatgctcctccagagcaagaaccatgttttattcttctattttccccgtggagtctagcatagatttcctggcttacacaatgctgaaaaatatgtgttgctgttgatgtagaaatattaccagggcagccctagagaaatagctgggaaagctcattattttcttaaattgttatcttccctagtttctttatctatagatactcttgcttaaagaactccagatggcctgggatgtcgcaggagcttggtgatcctttgccaaatacaagaggcctgcaggaaaccagtgcaaaccagaactggctaccccttgttccgtttaggtcattaacatagcgttacaatgctgggctccccatccctagaagaaaactgccgccattttctctccataggacgcatggagaaacatgtttatctgtgtctgtgcctctgtactttctccctgcatgtgtttacatagctccccgccccacatctaactcatcacaatcctgcagcttcccacagctagggagaaggtgactttttagagcaagaggtctctcattttccatttctggccagtgaataaaaccagcttgtcctttttcaattgggtgttctctctctggaacctatacagactagagaaagaactcagtctaccagtgacagatacactaagattcattcttgtcagcttctttactgccatttcccccagatttggatttcaagtggaaatgaacaaatgttattccaagagaatcttacataatgttttgctccagctacataaaggcaactcctccctgcaggcacatgtctagagatgccatttgtattcaggttatcaatcataaccatggccaatttgtacagcacatttcaccattagcattttttgtggcattatctcatcaacaccaaacttactacaggaagtaagggagaaagttgggggaaaaaaagggagagagagggtaacatgcaaaccagtagagtacacaaaagcagaatccaggtctttgctcttcagaggctttctccagcaataccagaatctgactgctcttttttttgaaataaatgaaactgcaggaaaaaaattatatctttatttcattgacatatttgagggccactttagctagtggacaaaagaaaccaaaggtggtcttttgtgatgcccctggagtagcccttctggcaactgggactactttttgttcatgctgttttaagcaagaggacagggagaaacatttattactgcatgagattacttatttaatgagctttgcacaaaaacatgaagctctagttgtctcctcgtctgattttacaaagtgcccaaaactacaaagacaatgtactaggaagtgatttaaaggtaaaactttaaatccagatttaaaatgaccctttcattgtaggacgtttgaaagcctcttgagatttacctgagtgagaggattggtcttggtgatgaatataatcactgagtctattttatcagatcccaaagtgacatggtatagtggacttcaaatgatcacctgctaaccagcagcatgagggtgggggagaaggaagagggacctcttttctctcgtgcttcaccaaataactgaatatgggggcagatgagaaggagcctgacacaagaacagaggaagaagtcacgtttggaagaagggggaaaaaggtcctatcatgtatttgtcaacttattagtctagatcagtgctattcaacggaaatatcatgtgagtcacatatgtaatttaaacatttctattaagccacattaaaggaaaaaggttaaattaattttaatatattttatttaaactagtatacctaaaatattatcatttcaacacacaatcaatataaaaattgagacagtttacttttgtttttgtttttgtttgagacggagtctcactctttcacccaggctggagtgcaatggcgcaatcttggctcactgcaacctccgcctcccgggttcaagagactttcctgcctcagcctcccaagtagctgggattacaggcacccaccaccatgcctgcctaatttttgcatttttaatagagacggggtttcaccgtgttccccaggctggtctcgaattcctgagctcaggcaatccacccgcctcggcctcctaaagtgcttggattacaggcatgagccaccacacctggccaagacagtttactttttggggggaatactaggtcttaaaaatctggggtgcgttgtacatttacagtacatctcaatatgaaatagccacatttcaagtgctcaataggcacatgtggctagtggctactgtattggacagttcagttgtaggtgcactaactggaatttgggacatcaaatacaaatcgttgtcagcattcagctacttaatttacttttgatattctccttctatcggcttccttactttctccaaaagacattatctcaaagcccacatgctgtgttagcaagtagttgtgggctttggagtgaaatagactaagggattcaaataccagcttcataaccttggactagctccataaccttggactagctccttaaccttgatgactcttggtttcttcaactgtaaaataaaaacaaaaatagctaactcaccagatcattgggaagataaacagagtatacagcacagcttagaatagtacagtaggcattcaaataataattccccctatatacaagtcaacttctaaagggcccatcttcagactttaagctttactgcttcatttactccaatttaagaactttctcttgagagttctgctaaggtagccctttccctagactttcacagggctggctccctttttgaaaatgcgggtttaagttcaagggtatcctttgtatggcagtcttctctgacttccctgttgaaagttgctcccacgccctgtccctctgtagccttcagcctctattttcttcatagcatttatcagtatctgaaatgattttatttatgtatttgttcacccgactgttttctgtcactctctctggcatagaagctccacaagggctgggatcctgtgtgtctcattccccactgtgtcatcaagtgcccagcacaaaacagagctcagcaaatgcttgtcgaataaatgaatgaaaacgtgctcagcacagggaggtaaaggtaagtggtgttctgattctaaaggtggtagagaatgaacattccagagctctgtttaactaaaaggattaccaaggaagtcagtgacagagcgccagcctcacctgctaatgttggatattgccaatcttgagtctaatggctgggcttgggaagggtcaggaatattatcctcccataggtgatcttgttgttgctacccgttaatatgtatcacaagccaagcacatgttcacaccacttaaaagcacccactagatttggctattcctgccttttagaagaatcttaatccggttggctgatgcaagtgcctgatattggggagcttgggagcactgggtagtggaaaaagagtgggtgccaaagtcagacagacctgggcttggatcctggttctgcctttcctgagctaggcggatgtggggtgtggggttggggggtgtatgtacatttccatgtttcagtttctttactggtaaagctttaaatgataactcatactctgcaatcttgctatgagaattaattgaggcaatgtgtgaaagtgcttagcacatcttaaaggctcagtaaatagtaggcatgaatattgctatctttgcatgcaggaatacctcaccaaagtatactgatagatctttggctactctgtggatatccaatttccttttaagtttccgatgtttccttctttcattgctacatcatctgaccacttgcaatggaggcaccaggaccccatggagagagagtacatgctgagttggctacatctgtgccaaactgtgaaagatgacaatggagatatttctctctacagtttctgaagatggacccagccacaacacttctttccatgcctggctgtttttagctgcaggcacagcactagctgttttgtactcaagattatgggtcaaaagagaactgagagacaggtcaagtatccacgccggtctggacatactttacttgccggcaatacatagtgctctccttgacactgcacaattcgaacagccagtctgactctgtattctgaggccaccactcctttttgtgcataactagaccagaactaattttactcattcttctactaatgtaagccccataggagagagagagtaagctgttcttaaaagcatgagactattgaacacttatttatggtgccacattaatattaagaaaaagtttatcattgactatgggctaggcatgattcatagtatttccattctcccaacaaccatgcaaaaaaaaaaaaaaaaaaaaagcagcattattttcattgtgctgacaggaaaagtgaagctcaggaaaactcagaggcttgctcagtgtgggagtcaagatctgaagcccagtctgttgagctccaaagccctgtgtgttttctgatgtgccttgctggcactgctagtggaacacccagggtccccagagatgtgagtccttagtcctctaaaggcaaagtacagaggttcaaaagaatatggctgcctactcatactatgcctcagggagcaaagactgcttcatttccaaacaaagccttggcctccctgccatccagctaggtgacctgaagagcactctgattcagacagcgatcctctttagatggctctccagggttggtgggactgaaaattctaggggtaaggactgtcgccttaggagagtcattaaaaagggttgtgaggaggggtcccctggagtcagaggctggtagagctctggagagagcatgtggggagctcacccatgacaggggagctgtctccttcagcagcgtggctgactccagacccccaagaaggctgtggattactcccacagtcagcccaaccagcagcaaggagttggctgggtggtcttgatacaggaggaggaataagggattgtcacctgggattcaggcatggctttcagggagtatccacaaaccctcagggattgcatgtaaaattttatgtacatgccatatgcattttgccccaggaagaggactcacagctaattctcaaaaggacctatcacccctaatttttaagaaccactgaaattaatattttcatctgctcctctcttgcactattcagcacttccacctcattaaacatttatatatatattatatatatttctataatatatatatataattaattaattccctaaactttgcagaaaaaaaatcgaagcccagagagggtaagtatcttgcccaagtttgcacagctgatggtcaggattgggattagcagcacttccctggtcaagtgaagcacgatttcaggtgggaaatcttgcccggtcaacttgacaaatgaagacaaagtgatccctccagactaataataatgttttgcaaccattttcaagtccagtcatagaatcccctacgttgcttgttttcagggcagtgtgggttgcttccccaggatacaggtagaggtcactaaaaggatagttttctactcaaagagccagaactccagcccttgccttcccctgccgtagcactcgggccggccctccagttacctgagtttgcctgactttaaccaactcctcttcccttccctcctcccttctccagcgggctctccttccagcttcctcccgggctgcaattcctctgcctaggtgcctccgtccagctccggcttctggcccggaggctgctcatctgcccctacccccgctgacttttgggaggagcaacacctttcaggtcagcattgctaaccctaaactttccccgccggatgcccgcgaggctgctgcggcggcggctgctgctgatgggagagtctcgagtccggctttcatcacatcacctgtctgcgccccttccccctccccgctctttttttcttttctttttattttgacgcaaataatttgcattctgagaatcccacaatcaacgccgaaactcatgctcaaggatacaggtgaagatgcctttgacaaaggcgaatgcgagccgagtgcagtttgtaaaagctggggttgggggcagtggtggaggcaaagcaccttaagagtattttttagcccctctgagaagggacatccgggcgggaggcgggcggatcccgggcttccccgccggctgccgactctggctcctggctggcgttctctccaggagcccgcgccggtggccccgctctccccttcagcacgcgggcctcgaacccgcatcccggagagcggccgcccgcgcagcccctgccgcgcgccgtcggaggcggcctcagctcgccatgggtactcacttttgccagggagcaaagtctgccacatcagtcgatgagtacttcctgcacgaggacatgaagctccattgtgtggaaagctgtttcgcgaacggtcggtaaaatccagaaagagggagaaggagtgagtaaggcagaaagcccagcccagaaaaccggcgtctggggatttcagcctccgctccccggtccccagcccggtggctctgtgagaagaagctcaactcggtgcacttgttcactctttcttcatgagaggaggagtcagtgttgcaacatttatgttccttgctggaggcaaaacagtgattttcttcagcatgcaaaacgtccagagcctgccagttttagaaggcgacggaggtagttgggggagctggaatcctgcgaagacctgaagaaacaactgattccccccagatcggttttgcatgattagggccacatatctttcattgagactgtaccagaaaatagacagacaaaacaataataaaaatgacttagtgagttgaatgacctcaaagatgatatttttccaggcagccaagatgtggagtgtctccgtgtcaaatttctttccttatttctgagtaacattgaacagcagctatatttgagaggttctccagggatttgaattgcaccttgcctgaggagtcagatagaaaggagcaaaagaagatagtcagtgacctaagaaggttttgcttttttttttttttaatacccaaagcgcaaacttctagtgtgctgtgtttattctctgccatatgaatataataaacattggcggtgcctaaatagccccacttctgttgttttccacaaataaagaatttatcttttctaatgggctgcatgttgttctgacttttcttcttcttgaaaccacacacaaccgccttttctcttgcaaaaacaaaaaccccacatttaacagtgctgaaacaaataatagcacctgcctgaatcaaatagttatttctgactatgtatgttgctggtgtcatttgatgccataataattaatgcatccgattgttacacaacccagagggccaccaaggaaatactttaaaccaaggttactgagtttttttttttgtttgtttttgtttgtttttttgagacagagtctcgctctgtcgctcaggctggattgcagtgaccccatctcggctcactggaacctctgcctcctggattcaagcaattgtcctgcttcagcctcccgagtaggtgggactacaggcgcgtgccaccatgtccggctagttttttgtatttttagtagagatgaggtttcaccctgttagccaggatggtcttgatttcctgacctcatgatccacccaccttggcctcctgaagtgctgggattacaggcgtgagccactgcgcctggccgtttttttttttgttttgttttaagttattgaaacatgaggctttcccctttgatttgactgctactctggataactgggaaatcacagttagcagtgagcatttgccaagccacaggaagccattgaaaatcccatgatgctttggtgatccttttggactggaatcccagaagcaactacctaggcataataacctaatacttcctgatcaataacacgtccttattaaaacatagactccacctggttctgttagctgatgggagatgcatctttcacgtgcagaccgcacatgcttcctgtgatgattagggtatatttactttcattcatgggtgtccatgaaggtacgcaacttctatttattttcagaaccactgggcgacatgagatcctcagtggcagaatatttctatatgacctttgcaaagcaaagggtcactcaattctacaatagttgttctaatcagactattttaacagttagtgaaatagaagatcactctgggtaactccagactgtcagctcttagaaggcagggacttggcttttcctccttgtggttcccactcagctgcaggcagcttggctcgtctgtactcctggcttacagactggtcgttgcgtggctaatccatacctcactggtaagaagggcagggctggctttctgctctgttgtgtagcacacaggcactgtcacaaagccacgggtactcattgtcagtgagttaccttgccccagctttcctgagatgatgaaatccgcagtgagccactatattttccttttctgccccacagtggttctttgactatctccttctctctatgcactgatgtgctccagcttcacagcttctttactgatgtcctcctctagttcatttctgcatctctgtcttagcggacgtgttcgtcctttgcaagctgactccctacctgagtcctggactccatatccgtttacttcctccaagaccttgcttctcagcctgatgcagaggaagagcccagcactggcactgggttaggtccttgctattcttggtttctcactgtaaattggacacagtagcatgtgcctcaaaaatccagtcaaatgaataataatggtgatggcatatgtaaaatgtgtgccatctaacaaagtctagaaacatcaagttcctttctttccttcccctttcctctacctttcttgcatatttaatcttttctgccccataggcttctttatctcaacctacaacttctacatcttctttgacccttttgatggctttacagtttaattcactcatttctttacctgccaatcttagtgaaagaatgacttacgcacaccagctttccttacttacttccctctcagtgccttaactcactggttctcaaccttggctgtgaacaagaatcacctgagtgtttaaaatgtactgtgtctgggtgtcacttgcagagcttctaatgcaggaggtttagaatggggctctgacttctctgtttttacaaaaatgcacaggcagggtggaaaatggctcccttgaattctttgcacctggctttcatcactaccactcactggctgctctctgggagggccctccaggcctctctgcagcactgggcttcggttcacttcctcctcttgaagttctcacgccttggcttccaggcctctgccatcctctggcgggagcctcccctctgtctgtggcattcctctgttggtttctgccgtggctccttttctctctcctccttctcaaatagggaaggagttttatcattgctacttcatttgtcttctttgagaaccacatttctttttttttttttttttttttggttttaaggagtggagaggttaataggcaagaagggtcaagaaggaaagggagaaggaagaaagaagaagcttccctgtacagagacagagggaggggggcgctccaaagccaaaagagtaagtccccacttgctgcggataccagccaggtatataagcagaggctggaggaggcggtgtttgatttgcctagggctcaggggattggtttgactaggcacgtaattcacgtagcccatgaaagagctggccctcccactctagccttttaatatgcaaatgcggggcgccatgatgttctacacaaatagggatatgtgggggcggccatgttgccaggaacatgtggggcaagggcaagaaggtccctggaatcggcatgtttgggtgaacccagtttctaatggcctaggtttgcatatcaaaggttgcccgcctggctctaaaagccggggttttacaagaaacttttctggagatactttaaaaaatgaaaacttcccaaggaccccttttactctctatctgcctaaaataatttcttgataactcatgccacattcctccctgtggcgatatcacactaactgctgttagggggttttgggcaaggactctttctggctacttcctgctgaaaaggggcctctaatggggaacagcagctagggctcctcctggggtcaacttaagcatcctcagaagaatggcatgtccatatgtgggagaactatgtttctttctttagaaaaaaaatagaaaactgctaaaaatatccaaagattaaaaaactaccccaaatcctagcactgttaaaaagaaatctacatctttatctatacagtaaaatatagtacttccaaatcacacatcctccttccttcatctaatcctgtctcagaggtaaccaccattgacgtattggtggttgcctccttttttacatgtgtatatagtcatgtctctgtatgcacatgcaaatattttaaaaattcaaaatgcaataatttctgtgacttttcttttttaaacttaatgaaatcacatattccaggtaactatgtatagatttactccatttttttttaatggttacatagtttgtaatatattctaccattcttccattgttaggtctttagtaattccagctttttattttaagaagtgctgctaggattgtctttgcatggactttaggatagatacttagaatggcctgattggcaggcaggttggctcgcgtctgcctgtaatcccaacactttggaaggccaaggcaggcagatcacctgaggtcaggagttccacaccagcttgcccaacatggtgaaaccctctctctactaaaaatacaaaaattagccaggagtggtggtgcacgcctgtagtcccagctgctagggaggctgaggccagaggatcgcttgaacctgggaggcagaggttgcagggagccgagatagtgccatggcactccagcatgggcaacagattgagactgtgtctcaaaaaaataaatagataaataaataaataaataaaataaaaaataaatgacttggttggctcaaagagaatgaacattaaaattttgatagctaccaaattgctctccaaatatgttgttggagaaagccctagaaatgagattactgagccacagggtaggaacattttaaattttcatatatacctccaatttttatccacaaatgtttcagtgtccactcttaccaaggatgtttactcacatttttgctagcactggactttatcaatcttatcttgctagtctgataagcaaaatatgatagctcattgttgttctaattcacagtgttctgattgccttcaaggttgagttcatgtgcttattatattttgactttttctcttatgttgtggctgttcaatcttatgcctgtttttcttttgagatggagtcttgcactgtcacctgggctggagtgcagtggcatgatctcggttcactgcaatctccactttccaggttcaagcaattttcctgcctcagcctcctgagcagctgggattacaggtgcccaccaccacgaccagcatttctttctgtttttaatagagacagggtttcacatgttggcctggctggtcttgaactcctgacctcctgattcgcccacctcggcctcccaaagtgctgggattacagttgtgagccaccacacctggcccgtatatatatatattttttttctcagatggaatcttgcactgttgcccaggctggagtgcagtggtgcaatctcggctcactgcaagctctgcctcccaggttcacgctattctcctgcctcagcctcctgagtagctgggactacaggcgcctgccaccacacccggctaattttttgtatttttagtagagacggggtttcaccgtgttagccaggatggtctcaatctcctgacctcatgatccaccaacctcagcctcccaaagtgctgggattacaggcgtgagccaccgtgcctggcctccatattttttaaaattaatttttggcatctcttttattattaaacatactaacactttgttcaatgtatagcaaacatttgtgcctgtcaggcttcctttgatattgtttatggactgtttcattgcacaaaagtttttaattttcatgtactcaaatctgtcaattattttctgttacagcttttgggttttttgtattgcttctttgcaattaactctgttaaattgttttttttttaatagatctttaactattacataaggtagacagttaattttctcctgaattttatttttaattttaccccttatagaaaaattcataatttctccactgatttctagtgtcacatatcatgtgttacattttgatatatatttatatgaattcgggacactactctgtttctttgagatgcctatttatatgccaaaaatatagacttttgtttactgtaactgtaaaaacagtacaatacctgttagtgcaaagcacactgtcactttccttttgaaattgtcttgataagtccactatatttattttttcataaaattttagggtcaatttgttcaattcaaaatctttttttggcattacattacatttatatattaatttgagaaaaattgatattgttagggcattaattcttcccatccaggaaatatatctatttatatctttttaaaagtatccttcaattttttaatgtaatcttatcattataatctttttgcacaataatttatgtaatcattctatattatgaacatttagattgttcccaaatttttactcttataaataatgctgtaataaacatacttatgggaagtgtagaaaaaaaagttgcctttgggaattaatttcctttgtctaaaacaccaggtgaggcccaactaggtcaaagggcatgcacttgtttatgggccttgagatataaaagcttattattttttttttatggcttcaactgtcagtgttctctctgttacactctacatccaattaggaatgaagtccttctggattaagaaaatgtggcacatatacaccatggaatactatgcagccataaaaaatgatgagttcatgtcctttgtagggacatggatgaaattggaaatcatcattctcagtaaactatcgcaagaacaaaaaaccaaacaccgcatattctcactcataggtgggaactgaacaatgagatcacatggacacaggaaggggaatatcacactctggggactgttgtggggtggggggaggggggagggatagcatcgggagatatacttaatgctagatgacgagttagtgggtgcagcgcaccagcatggcacatgtatacatatgtaactaacctgcacaatgtgcacatgtaccctaaaacttaaagtataataaaaaaaaaaaaaggaatgaagtccttaaatatttttgtcccttccactgttattgcctcaatttgtgccttcatcattttttacttcttcctcttcaatagcccccctggctggactcatcttcaccagtcttgcctacatcaaactcaaatgctttcatggtaaacttgattacattagtccctgaattaaaaatttttaatggcatctacttcccacagaataaagttagaacatctttactcctgctgatttcattgggctttagagtagtagtagctcaatacatatctacagtgtgtttgaatccatcctctcttcttggaatgttatttcccacccttcatctaaaaaccttacccattcttgatcttcagactccatggtactttcttcttaaagctttgcctgatcactccaactctgaaagaaagcactgtgcttgcttctgtcatgtagcacttgcaaatgggtttataatacatctgctttgttctacctccaaaggtcattgtgaggctgatatgagttgacatttggttaattataaaccatgtgtaaatataaggcactgctattattagacaatgtgtccttccttctaaggaaacccacgctggtggataagcagtgacctaagtaaaatcagcttttatgagcatgggaatgggaatcatttgctccatgggaagatgctaagagagctggcctattgactgataagaattcatgtctcccaaacccaaagagggaaaactgagtctgctgaatcaaatgcagcagttgttagtctctataatagctgcatagatgtcttcgggctactgtggtctgagtcctgctattcaaagtatagtcttagggccaggtgcactggcatcatactaattatcattttaaccctaggcctagtctatgagtgaacccggaaggtattagaatgaattgacttggtaattagtttaaaccaaaacaaatgatttcaacttattagattaatcataatcttattagaaatgcaagatctcagaccccatccctactttgtgaatcagactttgtattttttctttaatttataaagaacataaatttatttctcacagtcctggagactgggaagtccaagatcaaggtgccagcatttgatctggtgagagacttcctgctgcatcagactttatattttaacaagatccctaggtagttcctacgtacattaaattttgaagagttattttctagagaagtgacctccaaagttttctgtttatcatcttagcagtaaaatcatttttagcatgcctttccaaatacatatgtatttttagtcataaattatatatatgtactactgtattataaatgaatgaaagtagaaattttaaaagaatgaaataagatgaaacaaaaatttgaccatggaatactacacagccataaaaaccccaaatcatgtacttggcagtaagatggatgcagctggaggccattatcctaagcaaattaatgcaggaacagaaaaccaaatacctcatgttctctattataagtgggagctaaactttgagtatgcatggacgtaaagataggaacaatagacaatgaggaattctagaagggaagggaaggagcggggcaaggactgaaaactacctattcggtactgcgctcattggatgacgtgatcattcataccccaaacctcagtgtcatgcaatacatccatgtaacaaacctgcacacgtactcccgaatctaaaataaaagtcaaaattatttaaaataataaataaataattttatttttaatggtataaaccatttagttctgaaattattaattatcaaaattttaatgagaataatgtgattaagtatgcttttttttaaaaaaaagatgttggcttaacactttgagacacagtgatatgcagatctggttctaagtttagtttattttcagtttttagttttacacctattatggctgaaaaatatactgcatgaaaggtggtagaaattttctttttgttcagcaaaacttacttttttttaagtgaatgtttttagggtgtaacttgctataaaattcatactcattagtgtatatctctaggagctttgacaaatgcaaaaagtcacataaccatcacaatgtaggtgtagaatggtttcattactcccgcacaccccaccgccccgcagcccggcccctcaaaatacgctcatgcttctgcgtagccaaaccctgtccctaccctgtcccctggcaaccattaatctgttctctatccttatagtttcccttttccaggctgccatgtaagtagaattgtacagtatgtagcattctttcactcagcatcatgcatttgagatttacactttgggaacaattatcgttttgtaaaaggaaatggacaactcatttttaaatccaacaacttttttactacttcgtcatgaattaaacaagaaacttctgtgtggtaccagacattttcatactcactccctattttgtcaagttgcatattctaaaggtcttgcttttataaaataaactgcattgatgaaaacctgtagcacataaatggcaatcaagcagtggaggtaccatggcaacccctgtgtgtttgctgaactctttttgattctggagattatcttgtgtagtttccagaacttgtgttgagctaatttgagaactcagtgaaggcactattgtcaatctaaataccagtaaagattagtttctttcttagaaaaaataccccaaataactactatattattttcatacttcaactcactggatcatcttgtatacctaggtatgtacttctttcttggagagctttgctttagagccataattctcaaacatagctgtgcatcagaataacatgaggtggccattaaaatgcaaattccaaggccccattgcaggcctattcaatatgtgtccctggggaagaagagcctaggcaattgtatttgatatgttttcccagaagactcttatgcagctagcccagcacttgacggacacaagggttcaaaggccagtggtctagtgcttcacaacccagagctggatccagaagcaccacctgagagtttgttggaaatgagaaccaacacctggctccacctcagagtcactggatcagaatctgatttttaacaagaactccaggtgattacatgtatgtaaaagttt

SEQ ID NO: 356 - DNA, 115169 bp, Homo sapiens
acagtcaaaaggcagatgcacaactcagtttattcagcatcccccaggagaaaagagaccctaccagccccttccactgtaatatatcttttccatgcatgcccaaattcccccatgcaagaggcctacaagggtaataatagaaactttgtttcagacacaaaattattttaaaaattgttggctagtacagtggctcacacttataatactagcaatttgggggggccaaggtgggaggatcacgtgagcccaggagtttgagaccagcctgggcaacatagggagactcccatttccaccaaaaaaaaaaaaaaaaaagatttaaaaaacaaaatgccaggtgtagtggtgcatgcctgtagtcccagctaactggaaggctaaagtgggaagactgcttgagccagggaggtcaacgctgcagtgaactatgattgtactccagcctgtgtgacagagcaagaccctgtctcgaaaacatttaaaaaattgtataaaattacctttagctatatgaataagatgtatatgaaacataaaagaatttcatgtttagacttgggtccctttcccaagatacctcactatgtatatgcaaatattacaaaacatgaaaaaaatccaaaaaacttctggtcccaaacattttgacctgaatatgttgcctacaacagacactttttttgggggacaggaggagggtcttgctctctttcccaggctgaggtgcactggcatgatcacagctcactgcagccttgatctgccaggctcaagcaatcctcccacctcagcacccccgagtagatgggactacaggtgcatgctatcacacccagctgatttttaaaaaaagattttgtacagattacccagactggtctcaagctcctgggctaaagtgatcctcccagtttggcctccctaagtgctgggactacgaaccacaacacctggtccacattttaaattcgaagacaaaataggttgacagtaaaaggatagaaaaagatatactatgcaaacagtagtcaaaacagacctgcagtggctacaccactatcaggcaaaacagacacaaaaattgttgtgacaaacagcattttataatgaaagatagccaatacatcaaaaagatatagcaattataaacttatatgtacctaacaacagaatcgcaaaatacacaatgcaaaaaagtataaaattcaaggaagaaacacaattcaaaaataaaagttggagatttcaatgccctgcgttcaataacggataaaataagtagacagaaaatcaatgaggaaatacaagacttgtacaacactataaactactaggcttaacaaacacctacagaataatcaacctcaaaacagcagaatatacactcttctcaaatacatataggacatttccaagacagaccaaatattaggtaataaaacaaatctcagtaactacatggattgaaatcacacaaagtgtgttctctgacaaaaatgcaataaaattagaaattggcaacacaaggatatctggaaaattcacaaatatgtgaaaattaaaaaacataaaaataatcaatgggtcactagaaggcataaggaaaattagaaaatactttgagataaaaatgaaaacacatcaaaacaaaatgtattggatgcatctaaagataaaatttataactgtaaatatttacattgacaaacaagaaggatgtcaaatcaataacctaacctttgaccttaaaatactagaagatgaggaacaatttaaatctgaaacaagctaaaggaatagggagtagaaaataaaaataccactgaaatttaaaaaaaaaatcaagaaaacaaaaattggccctttgaaaagatcaacaaaactaacaaacttttagctaatcaaaaaaagaagagggaaaacacaaataactaaattcaagaattcaaaagggagcaattacaccaacctttcagaaataaaaaggataagagaatactgttaacaactgtacatcaacaaattagatgactgagatgacacagacaaattcctaaaaagaaacaaattatcaaaatcgactcatcaagaagaaattaagaatttgaacagacctataaaaagtaaaaagactaaattagaaatgaaaaatttctcacaaataaaagccctggaccagatcacttcaaacatttacagaatttacaaaaactggttttaaaaaaaaaaaaaaaaaaaaaagaaggaacacttcccaattcattgtgaagccagtattactccaataccaaaaccagacaaagccatcacaagatgagaaaactaaagatcaatatctcatcaatacagatgcaaaaatcctcaataaaatactagcaaacctaacctagaacattaaaaaacaaattatataccatgcacatttgggatatatccaacaaaatcaaggttggttcagcacataaaatccaatcaatgtaaaaaaccacattaacagaacaaagaacaaaaaccaggcaggcacagtggctcatgcctgtaatcccagcactttgggaggctgaggcaggcggatcacctgaggtcaggagttcgaaatcagcctggccaacatggcaaaaccctgcctctactaaaaatacaaaaattagccaggcatggtgatgggcacctataatcccagctacttgggaggctgaggcaggtgactcccttgaacctgggaggcagaggttggcagtgagcagagatcatgctgcactgtactctagcccgcgcgacagagcgagactctgtctcaaggaaaaaaagaaaaaaaagaaaaaagaacaaaaaccaaatcatctcaaaacatacagaaaacacatgtgccaaaattcaacacccttttatgctcaaaagataacaaacagaagaggacataatcaagttgattatggtgaaaaacttcatggtgaaaaacaggatacattcccagtaaggccaggaatatggggatgtccactcttgccacacatctatttaatattgtactagaggttctagtcagaagacgaggcaagaaaatgaaataaacggaatccagactggataagaagtaaaactatacccatttgcaagtgacataatcttagatacaggaaaacctaagaaacaaacaaaaacagtattagaatcaataaacacgttcagcacagatgcaggatacaaggtcaacattcaaaaatcaattatatttctatacattagcaataaacattctggaaataaaattaagaaatcaatttcatttacaataccaccaaaaaaaataaagtacttaggaacatatttaacaacaacaaaaaaatgcagcttgcactctaaaaactacaaaacactgttgaaagaaattaaagtagacctaaatatacagaaagacatcccatattcatgaatgggaaaacaatatttttaagatagcaatactcccaaagttatctacagattcaatgaactctctatcaaaattccaatggcctcttttagcagaaacggaaaactgatccttaaattcatatgaaactgcaataggcactgaatagccacaacaatactgaaaaagaaaaataaagatgctcagtatcatctgtcatcagggaaatgccaataaaaatcaaaatgacatactacctcacatccagtaggatgactataatcaaaaagaaagacaatgacaggtggtaatgaagatgtgaagaaatatgagccactgtttccactcctattgtatatacccaagagaactgaaagcacacaaccacacaaaaccctgtaaattcaatgcagcactatttataagaacccaaatgtccatcaactgatgaagagagaaacatgtcctatatccatatgatgaaatattattgaccatgtgtggtggcttacagattacatctgtaatcccagcactttgggaagctgagataattggatcacttgaggtcaggagtttgagaccagtctgtccaatgtgatgaaaccctatctctactaaaaacacaaaaattagctgggcatggtggcaggagcctgtaatcccagctactcaggaggctgaggcaggagaattgcttgaacatgggaggcagatgttgcagtgagcccacattacgccactacactccagcctggacaacagagtgagacttcatctccaataaataaataaacaaataaataaaattcagtcattaaaaagaataaagtacctatacatgctccaacatggacaaatttatgctaagtggaataagccagatttttaaaaagccccatattccacttacatgaaatgtctagaatagcaaatctacagagactgaaagtagattagtgatttcctaaagccagggtatgggaaatggggaatgactgtgaatgagtatgaagtatcttttgggggatgaggaaatgttctggagtgaggcagtggtgatggttgcacaactctgtgaataaatgaaagattactgaattgtagtatttaaaagggtgaatttcatggtatgcaaattataactgaaaaaggaaggaagggagaaaggaaggaaacaaaatagaagtggctggttctatgaataactagagatcatttgctcacctagagaagcaactgcctcagctccagtcaatagctgctacagaagttcgggctcagtattatcagatatgctggtttttcaaaaagccctaatccaaattttaatgtgagatctccccaatttcaaatattagcaactaattcaaatttttacaaaaacaaccatgttatccttgcatgctgccattttgtaagcactgacaactttaatttctttttagttatattattttcaaatgtcaagtaacattaaggaattatcaaagaaaaaatgtaaaaattattaacacagaatataacataaaacaagaaagtgttcctttcttttctttctttttttttttggagacagggtctcactttgttgcccaggttagagtgcactggcatgatcactgcctgcggcagcctcaacttccctgactcaagtgatcctcttgctgcagcctctcaagtagctgggactacaggtacgcatcatgcctggctagttttttgtttttgtttttgtttttttatatggcgtctcactgtgttgcccaggctggtctcaaactcctgggctcaagcaatcctcctgcctcggcctctcaaagtgttgggattacaggccatccagcctggtctcgagaaagtgctcccttcatcatgcctatcagtaccatttcaagggcaaccactgtattacctcagtttttaggacttttaatcaagacaaatataagactaaattttaaacagctgagaagaaaacatctagtctaaacatcttattttaaaatctgagggccaaaaagataatataacttataaagttggacaaagctaagacttgaatacctgtttcttatttcttactcaagtaaactttccataatgccatatcactccaatttaccttttgaggaaacaactagctggaatacaaaattctcctaccatacatatgcacatagagaaagtcacaaagtggttggggaagttttatttagtatattctctttcaataaaaatttaaattctcaacgaaatttttcaggtggttttgttttgttttctgtgacagggtcttgcactgtcacccaggctgatgtgcagtggtactatcacagctcactgcagcctcaatctcccgggcttaagcaattcttccacctcagcctatagcatttgctaccacgcccagctaattttctgtagagatggagttttgccacgctgccctgatgtctgcaagtaccaatccccactgtacggctgaggaatcagaatatgactgagatacagctgatttagaggaggtaattgcaaaatgagcctaaaacatctcactgaaccagaaagaaagcacataaagacttatggggacatgtcagaaggccacaggcacaacttgaaggggattccacttatcaaatatgggacaatttgagcatcaaaataaaaataatgttggattacaggcccactgaatagaaaaaatgaaacaatgaagttaggcccaatagctataatctcagctactcaggagactgaggcaggaggatcacttcagcccaggggtttgtatcccaccagggcgacatggcaagatcccatctcctgaaacaaaaacaaaaacaaaaaaaaaaaaaaaaagaaagaagaaaaccatgagtccataaaaacaaagataaacaaataaatcaacaatgggaggaagagaaagctttttcttacagtagaatgtcaactaatgaatgtaataaaattagaaagaccaccattcagcaatcatcaatagaaataattaagtaataattcaaccaagaaaaatcaacaaatgctaaagctagtggatgaaaagtgtgatgaggaatgagttacttagtttcaacacaccatctccaaaaaataatcatttccactcatttttcaaaggaaaaaaaagtaccctttctagtgtagaaagccagcagacaaaaaaaaaagcttaagtcaagtgatccatgttaattaagatcatcagtaacaggcaaattaaaatcatgtacctaactagcctgacttcaatttttaaaaattaaaaaaaagtgccaactggtaaggtaacactgagaagaataccacatcacctctgtgatactgctaccaaaaattgataacctgaattgattcatagggaagcattagacaaatctcaattgagaaatagtctaagaattaactgctctgtaaacctcaaaactgtcgaaatcatgaaagtcaaggaaacgttatggctgttctagattgaaatacatcaaaaagacacaacaactaaatgcaaattataatcctgattgaattattttcctaaaatgagcattattgggactactggcaaaacttgaatgggttctgtggattagatgatataatccacaggttctatcaatgctaacctcctcattttgacagttggattctggatatgtagaaaaatatccttattgatagcaattacaaactaaaatattgtggggtgatgggacctcatgttagcaagttactctcaaataatcaaaacaaatttctttatactggttttgcaacttctggaacttatttcagaagaaaaaaattgtaaaaacaaaaacaaagtgaaaaaaatctattcttctccagtcttatcaagaagcatctctatttttccagttgctcaaaacaaaaattttgagataggcttgacccctctcatgctctcaccttatattccaatccattagcaaatcccattagctttcccttaaaaatatatttcactactccaagccataatcctctcttgcatggattactgaaatagtttcatatctgatcaacttgattttactccaaactctaatataactcatttcctatacaacaataaggatcacccttttaaaaagtaagtcagagaatgttaatgctctctctctgtcagaaagtactggtagtttctctactttgaataaattccaaagtccttgccatggcttacttcatataatctagacttccctacttcttgtttttttgtgttttttttttcttttttgagacagggtcttgctttgtcacccaggctagagcgcagtggcacaatcatggctcgctgcagccttgacctcttgggctcaagtgatactcccacctcagccacccaagtagctggtactacaggtacgcaccaccatgcccagctaatttttgtattttcggtagagacacggttttgctatgttgcccagtctggtcttgaacttctgggcacaagcaatccacctgccttggcctcctaaagtgctgcgattacagccgtgagccaccatgcctggccaacttccctacttttggtgttatattctactacagtaaaggttagatacagaacactgctacttccgccaagactaacacaatggatgatcccatccccaccactgcaaaaaaagaaaagaaaagagaaggttgtttaaataccggtaggctaaaaacataaatatccattacagcttccatggcaatgcactctcacgagtctccattcttcaccccacttcccacatctcacctgagtctgcttcagaatctcttcttccttgtttggctattaaatgccagtgtcatttgaagtttcattcttgcactactactcttttcattctattgagtctcttgaagaaacatcacctataaactaaccctcaaatctgtatctccaatctagacagagctaagcttcaaattccaaattatataaaactagttgttagatattttaatccttggccacatgcttaggatggcaaagcagtaagttaaaaaagagtgcatgcttccctctccctctccctcctcctccccctccctccctctccctctctttccacggtctccctctgatgccgagccgaagctggactgtactgctgccatctcggctcactgcaacctccctgcctgattctcctgcctcagcctgccgagtgcctgcgattgcaggtgcgcgccgccatgcctgactggttttcgtatttttttggtggagacgcggtttcgctgtgttggctgggctggtctccagctcctaacctcaagtgatccgccagcctcggcctcccaaggtgccgggattgcagatggagtctcgttcactcagtgctcaatggtgcccaggctggagtgcagtggcgtgatctcggctggctacaacctccacctcccagccgcctgccttggcctcccaaagtgccgagattgcagcctctgcccagccgccaccccgtctgggaagtgaggagcgtctctgcctggccgcccatcgtctgggatgtgaggagcccctctgcctggctgcccagtctggaaagtgaggagcgtctctgtcctgccgccatcccatctaggaagtgacgagcgtctctgcccggccgcccatcgtctgagatgtggggagggcctctgccccgccgccccgtctgggatgtgaggagcgcctccgcccggccgtgaccccgtctgcgaggtgaggagcatctccgcccggccgccccatctgagaagtgaggagaccctccgcccggcagccgccccgtctgagaagtgaggagcccctccgcccagcagccgtcctgtctgagaagtgaggagcccctccgcccggcagccgccccgtctgggaagtgaggagtgtctccgtccagcagctgccccgtccgggagggaggtggggggggtcagccccccgcctggccagccgccccgtccgggagggaggtggggggggtcaaaccccggcccggccagccaccccgtccgggaggtgaggggcgcctctgcccggccgcccctactgggaagtgaggagcccctctgcccggccaccaccccgtctgggaggtgtacccaacagctcattgagaacgggccatgatgacaatggcagttttgtggaatagaaaagggggaaaggtggggaaaagattgagaaatcggatggttgctgtgtctgtgtagaaagaagtagacatgggagacttttcattttgttctgtactaagaaaaattcttctgccttgggatcctgttgatctatgaccttacccccaaccctgtgctctctgaaacatgtgctgtgtccactcagggttaaatggattaagggcggtacaagatgtgctttgttaaacagatgcttgaaggcaacaggctcgttaagagtcatcaccactccctaatctcaagtacccagggacacaaacactgtggaaggccgcagggtcctctgcctaggaaaaccagagacctttgttcacttgtttatctgctgaccttccctccactattgtcctatgaccctgccaaatacccctctgcgagaaacacccaagaatgatcaataaaaaaaaaaaaagaaagaaatatcatttgaaaaaaaaaaaaaaaagagtgcatgctgactactttgagtcttcagaatgattatacgataaaagtaaatcccttatttggtaaccccttgtatttattacaaacagccaaatatacttcctgatttagtgagatactgagatgaggctctggcaatgacaccctgattttatctctttcacatataagatttcatcatgattgtcagactgtcagactggaaaacctcaaaattcacaggacactgggtagtgtactcagaagggtgtggtctcaaaagtagagaaaaattatgctaaactaaatgctaccctggttctacctaatgaaacttaagagcaagacgcaaaggatctgtttccaagtaatttaactgcttcccaaaacatacaagaatgcaaaaatgtccagtgcctaacaaggtagaattcataatatatggtattgaatcaaaaagtaccaaatatgaagagaggcaggaaaatgtgagccagtcaactaataataacagacccagatatgacacaaatgatagaattagtacagttgtcacagctatattccatatgttcaagcagatagagggaagatgctaagtggaggcatggaagatgttttttaaatgaaatttttacagataaaaaatacaatgcctaagatgaaaattacactgaatgaaataacagtaaatcagacatcggagaaaaagattagtaaacacaataatgatgacaaaaaataaaaccaataaacaactacaaaaaatgaacagagcataagcagacactaagacaaactgaaaggagcctaatatacattcaactgaagtccccaaatgacagcagggcaagatagaatgtatacttgaagaaatgccataactgtttggaatttgacagaaactataaacccatagatccaaaactctttatgaacccaaggcacaaaaaacttgaaaaacactttaccaagatgcatcacaaactgcttaaaaaacacattatacacacagaaatagcaataggatgacagcagactttctcatcaggaataatgcaaacgagaagacagaaaacatcatcattaaagtaaaggtatacctgagatattgcgggttcagttacagatgatggcaataaggcaaacatcataataaagtgaatttttttgtttcccaatgcatataaaagttatgtttacaatgtgtagtctattaagtgtgcaatggcattatgtctaaaaaacaatgtacatgccttaattaaaaattatttattgctaaaagaatgttaaagaacacctgagccttcagagttgtaatctttctgccactagagggcctccatgttgatggctcctgactgataagggtggtggtggttgctgaaggttggggtgactagggcaatttcttaaaataagacaacagttttatttagtttaaaacaaacaataagtttgccgtgtcaattgactcttcctttcatgaaaaattttactctagcattcgatgctgtttgataaaattttacccaccatagaactttttccaaaataggaatcaagcctcccaaacccttcatcgactgagttgcttattgctgctttaccagtaagtttatgtaacattctaaatcttttgttgtcatttcaacaatgttcgcagcatcttcaccaggagtagattccatctcaagaagccactttgtttgcttgtccataagaagcaacttctcatccatccaagttttatgagattgcagcaattcagtcacatcttcaggctccacttgtaattctagttctcctgctatttccatcaaatctgtagctacttcctcctctgaagtcttgaaccccttcaaagttgtccatcagggctggaatgagcttctttcaaactcctgttaatgtttatttttttacctcctcccatgaatcaccaatgttcttaatggcacctagaatgatgaatcctttccagaaggttttcaatttactttgatccgattgatcagaacaatctgatcactgtctatggcagctatagccttacaaaatgcatttctttttctttttttagtttcgcagtgcatataaagttatgtttacaatatactgtagtctactaagtgtgcaatggcattatggctaaaaactgtatatactttaatttaaaaattatttattgctaaaaaaaatgcttaaaaacatgtgagcctggcttaggctaattttttattagcctaattttttatttttatttttaaagacagtgtatcactgttgctcaggctggttgcaaactcttggcttcaggtgatcctcccactttggcctcccaaagtgttgagattacaggcatgtaatttttcaattatggtgctgggaaaattggactatcatatgcagaagaatgaaactgaatcattatgtctcaccgtatacaaaaatcaactccagatggattaaggacctaaatgtaagatgtgaaattatgaaattacgaaaagaaaactagggaaaactcttttggacactggtctaggcaaagaatttgtgactaaaacctcaaaagcacaggcaacaaaaacaaaaatagacagacgggacttagttgaactaaaaagcttctacacaaaagaaataatcaacagagtaaacagacaacctacagagtgggagaaaatatttgcaaactatacatccaatggggactaatatccagaatctacaaggaattcagacaacttcacacacacaaaaataaaataatcatcccattaaaacatgggcaaaggacatgaacagacatttttcaaaagaagtttgacaaaagaacggcaagatctttaaaaaactagaaaagaatgctaagagaaatcaaagacctataaattgaacaaaatgccatgttcggaccagaagactcaatgttgttacaaaattcaatgaaatcttaaatatcctggcagccaatactgtgaaaactgaaaagctgattgtaaaatttacattgacagtctgggcaacatagcaagaactcatacctacaaaaaaattaaaattatcagctgggcatggtgccatgttcctgtagtcccaactactaaggaaggtgaagcaggaggatccctgagcccaggagttcgaggctgcagtgagcaatgattgcgccactgtactccagcctgggcaagggagggagaccctgttgaatacagaagaatagaacagaacagaataggaaatgtgaaggacctagaaattctaaaacaagtttgaaaaagaagaaagagaacttaaattatgtaacttcaagacttattataaagctataataatcaagacagtgtgttattggcatacaggtagataaatggttaatgaaacagattatctagaaacagacccatatatacatgaccagttaattttttttaaagggctaaggctattcaatggggaaaggataatcttttctatacactgtggtacaacagctggatacctcagctgtcacctcataacagacaaaaactaactcagaatagatcataaacctacatataaggactaaaactataaaacttgtagaaaaaaattatggtgaccttgactttggcaaagatttctttgcattttttaatggtgtcttttgaagagcaaaagtacagtacatatcttaaaagaaaaaaatgcattgaacttcaaaaattaaaaatgtttacccttcaaaaaacaccattaaaaaaataaaaacacaagccacagactacgagaaaaaatgtactaaacacatacctgacaaaatatttgtatccagaatatctaaagtactcttacaacccaacaaaaaaagacaaacattaagattaggacatacacttcaccaaaaagacattaaggatggcaaataaagccatggtcaataagataagatgctcaatatcattagtcatcatggaaatgcaaaccaaaactacaagattacaaaagactagccatccaaagtgttggcaaggataccgtgcaactaaaatgctcatgcactactgttgagaatgtcaaatggtacaaccgctttggaaaacagtttggcagtttctcacaaaactaaacatactcccatatgaaccagtaatcatgctttgtatttacccaaatgagtcaaaaacttagatctacacaaaaacctatgcatgaattttattagcagctttattcataatggccaaaacttggaagcaaggtgttcttaagaaagtgagcagataaagtgtggcatatccatatgacggaatattaagaactatcaagtcacagaaaagtcatgaaggaatctttaatgcttattactaagtgaaagaagccaatctgaggctgggcacagtaactgacacctgtaatctcagcattttgggaggccgaggcaggcagatcacctgaggtcaggagtttgaaaccagcccggccaatatggcaaaacccgtctctactaaaaatacaaaaattagccgggcacggtggtgcatgcttgtcccagctacttgactggctgaggcaggagaatcgcttgaacctggaaggcagaggttgcagtgagccaagattccaccactgcactccagcctgtctccaaaacaataaaaaaaaaaaaaaatttttaaaaggctagatactattgattccaactatgtaacacttcagaaaaggcaaaactatggagacagtaaaaagatcagtggctgccaggcattcaggaggaggggagcagggatgaacaggtggaccacagaggatttttagggcagtgaaatcattctgtatgatattgtaatagcagatatacatcactatactatacaacactgtatctgtcaaaacccccagaatatacaacagagttaattctaatgtaaattatggactttagtttacaataatgcctcattatttgctcatcacccataacaaaggtacgacactaacgcaagatgttaataacaggggaaaccaggaggggagttaagaggatgagaatatatatgggaactccctactttccactcaatttttctataaacctaaaactgctcaaaaaaataaacttccctccttttcaccttcaaaaagtgaaagaaacaaaatgagatttgaaaagacatctcatcaacatctgaaatgttggcaaggatgttgtacaactaaaacatcatacattgcattgatgagagagtgtcaagcggtacaatcacttcagaaatgttcgacaattttttacaaaggtaaacatgcacctactgacatggtttaaatctgtgtctccacccaaatctcatgttgaaatgtaagccccaatgctgcagcctggtgggaggtgactgaatcatgagggtggtttctaatggtttagcaccatccctctagtgctgctctcctggtggtgttcctgagatctggacgtttaaaagtgtgcggcacctcccccgtctctctcttcctcctgctctggccatgtgaagtgctggctcccccttcgccttctgccatgattttaagtttcctgaggcctcttcagaagctgagcaggtgccaaaatcatgcttcctataaaacctgcagaactgtgagccaattaaacctcttttctttataaattatctagtcttgggtatttctttatagcagtgcaagaatggactaatacacctaccatatgacccacccattcaatgcctacgtatttactcaagaaaaatgaaagcatatgtccacatgaatatacttgtacacaaatgttcttagcagatttatttgtaatagcccaaaagtggaaacccaaatgtccatcatcaggtaaatggttaaacaaattgtggtacagccatacagtagaataaataatattcagcaataaacagaaataaactattgatacatacaataatacggatgaatctcaattatgctgagtgaaagaagctagactcttccccacttcaaaaacagtacacacatacactgcatgaccccatttatacacaattctagaaaaggtaaactaatctatggtgacagaaagtagatcactggtttaaaaaaaaaaaaaaaagcagatcattggttatctaggaacaacggatagaggtaagacagtgacgaattacaaaagagcctgaacaaactttcagagatgatgaatatgttcactatcttatttataactaccaaaactaggggtgacagtttgacagttatacacatatgtcaaaatttgccataattatatacttcaaatgtgcagtttattgtatgttaattatctcaagttattttacaaaattattctttaatgctactagctctgcaactctgatcattgattttaggccaatttatgaatcacaccacaaatctcattactctgcagacatctttgcttttgatttttaaaaaatatattacttaaactggtgattcctttgtttgccagaccgtaaatgaactgagtttttaaaaaatgaagtcaaatctgtcgtcattggttacatatatcctaattgcaagtattcaaaaattctgaagttaatttcaaagaagtatttcccacataacaccagtcacctctgagaaaaattaggtggctgcaggtaaaaggaagagaggagagggttctgagacctttcactgtgtatccttccaaacattttgaactttgtaccctatcatttactcaaaaccatataaaattcaaatttaggcagggcgcggtggctcaagcccgtaatcccagcactttgggaggcaaaggtgggcagatcacgaggtcaggagatcgagaccatcctggctaacacagtaaaaccccgtctctactaaaaatacaaaaaattagctgggcatggtggcaggcgcctgtagtcccagctattcgggaggctaaggcaggagaatcgcctgaacccgggaggcagaggttgcagtgggtgaagatcacaccactgcactccagcctgggggacagagcaacactctgtctcaaaaaaaaaaaaaaaaaaaaaattaaaagggaatttaaaaagtgttctcccaacattttaagtaataatataaaagcaacaatatagagcctcccagaatgaataaaagaaataatacttccatagatgcaataaatttggttaagttttaataacttaatagtcataccacatatgtaatctcaaattgtttgaatgatcacactccacataaagtggcagtcatttgtaaacatgcctgcacatcctcagaaaggcagagaaaaatctaattttcatctagtggtccctgtggtcctagtaattatcacatttgggatgtatttgcttcctttctcttatcgagttttaaaaggtcttttagttgataaaatgttttatcatttcttgaattaatatttcaaaagaatgtgtagtttatttggcaaataaatttgagtttttaatatttccttaggacacaaagtattgtagaatgttttagagtcacatagggacctgggttcaaaacctagcggtagttataggtgactctcggctattacaaacccatgtccttgtttatgaaatgaagatagaagagactatatgacaggtttgctttaagtgctgaataaaataatatataacacctaacacaaacacctgacaccttatcagatgtcagttctcttcctccaaacagctcagtgttaaaggcaatattcaactctaagcggcaaattgatttttctcctttttaaggtattactcagacaatatatttgtaatttttaacagatcccttcttactcatccatactttctctctcagtgggtcatgttacatacaaaaataaagacagcaagaagagctcagacggtggaaccagactgcttgggactgaaatcggcatttgccacttaccaggtgtgtgaccgcaggcaaatgacttaatctttctttgccttgatttctttacttgtaatatggagatttatggcataatagtatctcaagattgctatggaagttaaacgtttaagttaatgtaaagtgcttagaaagaggctggcatatagtagtaattatgcaaatgtttgttaaacaaaattaagttgatacacacttaggggtttcccccaccccacttagttctcaatactgagaatgcgggggaatttgttttaaatgtttacaaatgtttacaaatcttaattttttttctatatttgattattttaaagaggaaagaaggtagctcttagaacaaatttagactttaaaaaaaattctcaatctgtaccctgactgttgtccctgatactgttatcaggcactagaaaaaaagcaacaacccataattggtttaccaaaaacatcactcaactgtttatggacgataattagcaataacggctgtcagtgccacggttcctctgtaaaaacggagacaactgtatctactttatatgattgttacaaacatttaatattatttgtaaagcacttagaacaataccagagcagagtgaacatttaaaaaatagctaacatttattaggttcagaatttgagcccaatcctgggcagaatccacttctacacactacagttggccctccctatctgcacattccgcatgtgtggattcaaccaactggagatcgaaaacaaatttaatttaaaataatgcaacaataaaaaaacacaaaaaatgccgtgtaacaataatttacacagcacttacactgtgttaggtattacaagtaatcaagagacaatttaaagtatacggaaggatgtgtgtaggttgcatgcaagtactactcaattttatataagagatgttgagcaactggggattttggtatttgtgggagtcgaggttctggaaccaatcccccgcagataccaagggatgactgtgtattacactgcctctcgttgtttgtttatttttttcaaccaacatttaacatatgcttactgtgtgccaatatgctctcctcaccaatcttgattttaaaaatgataaaatgctaacatcctctaaaaattaaaaatccttccaaagtaagcagaatttataccttaatactttattaatataataaaaccatgaccaaggcttcagtcaaaatcagttcatattgaacaacatattaatattttgctgatgggagtttaacactttctattgcaaaactccccaatgatatcaaacacagtacttctcagtcagaattctgaagtcaacacgttgcctgaacctcaaactccaacacaaaaacccaagactagccaattctcttcaaatcaattcctgtaatcctcttcattccatgctttgtaaaaatgttatttgtgtagctggctgtcttcattatacaggaccttttaaaaatgtatttacttatttattttagagatagagtctcactctgtcacctagcctggctcaagcaatcctcctacctcagcctcctgagtagctaagactacaggcacacaccaccatgcctggctaatttttcaatttttactagacatggggtcttgctatgtttcccaggctggtcttgaacccctggcctcaagtgatcctcctgcctcagcctccaaagtactgggattataggcaagagccaccaagcccagccaggaaacactacttaggtatctttctatctcccacagcacctaacagtactttgcacatagctagcctattaccaaacatcttaaataaattgcaaatttgactctccttacaaccataacataatatagcacacatatgtttcagtcaatctaacctatctgcttttctcaaaggacttgctattaatagagcccccttcctggtccttgatttctgctcatcccttgaatacccatctcccctctctttagtaaatcttactactaatttgcatctcaaaacaatttacccaggaaaccattcggataaccaaaagaagcaaatagataatcaaaaaaagcaaagagtaggagtcaataggttctgagttatactacgaagtgttccatatgccttattgatagctactttttgtctctgtgctgtctgaaatgcttccttttttctacttgtccaaaccatcttttaagggcccagcttaagccctccctgtcctcttcacctggtcatcttaccatgtataaacgataatggaaaagaattatcgtctgtggactgtcagacgatgtgctagacatttcacatacactaccacctaaccctggctacactggaatgacagcacttgccatctctccactcatcacacagtcacctttctgaaaggatattacctcatagaacagcttcctaactattccatatttttacatgtgctctctgccactagactacaataacctcaaatataggaactatgtcttctactttattctgcactcatcttcttttccctccacctttcccctcatctttaaaaatatacccctcctatttctcaatctcttctcattactactgcaatgactactaataaaagctactattgaccaggcgcagtggctcacgcctgtaatcctagcactgtggaaggccaaggcaggcagatcacctgaggtcaggagtttgagaccggcctggccaacatggcaaaaccctgtctctactaaaactacaaaaattagccgggtgtggtggcacatgcctgtaatccctgctacttgggaggctgaggtttgagcccaggaggcagaggttgcaatgagccgagatcgtgccattgcactccagcctgggcgacagagtgagactctgcctcaaaaaaaaaaaaaaaaaaaaaaaaaaaaaaaaaaaaaagctactatttataatggcttgcactgagcagacactctaagtgttttacatttgatttcatccttacaacaatcccataaggtagttatcatttccctgtttcacagaggaggaagtgggcttagagagcttaagcaacttgctctctcacattcctatgagccttgatccataaaacatcactatggactcccacaactttaacatcccccactgtgtttcttttcatccttaactgctgtggcagtttatactgtgtcaacctggttacatccaaactacatttcccagaatcctctttccatagggtaggtggcccaaagagcaaaagactttctgaagagtatggttagatagagctgcagttgccagccgactgcgcagctctcctctgctctgtatacagctcctcttcttgattgccaaccctgctgaccaaacagcaaccccaggttcaccaccaaaagcttgactgaggaccacaaaagaggcagctacacagaggtgacaactctccacagacttttcaccagctccagtgtgtggtcccactccagtagctgggcatacctggcttctcagattcacctgtaaacgctgagctgaccactgcacaactgcttcaaagaggctgaatagtagcttttctctgacctgccctacagactctgacttctggagtttctcccacagctgtatgaagtcctattcctttcctaaatcccttattccataatatcatagtagctctgttttcttgattgagcccttaaatgattcaagtactcaagcttcctcccaatctactgaccaagaaatctctgcagctttccctctgagatcttcttgcatatataacaaaatctacatcatttggtctccaatttgactgcttccaaacaaaccttgttttatcagttctgcactgtcctcctttgcttccaaggaacaagtaaccctcattccaaaaaagtcgtatctcactacttgatcctcccatttgcaaaaagcaatatttaatggagagaatactagagtgggtaacagattaacaaacgtcaataccaatttattaactaagaacaagattagctaaaaacactccagggttagccaggtgtggtcgtgtatgcctgcagccccagctactcaggaggctgaggtgggaggatcccttgagcccaggagtttgagtacagcctgggcaacatacaaaaaccctatctctggaaaaaaaaaaaaaaaacccaacaaaacaaaacaaaaagaatactcagaggatacgtgtatgctttagttagaaatgtgaagattgagaaaggaagaacaagaaataaaaaattctgagaagaaaaatatttcgtgatgtatagtttgtcccaaaatgtgtttttccccccatttgaagtaaggaagcttcacttttttatataatcattttgggcttatccaagtgtctccctgaattatttttcggttgctactgggcataaaggaagactgtatgtacaatttttccaatactttttttccttctccaaaaagatcttcaccccactccctacctttttggctaacatatttccaaaaatgtattttattagtcttggttctccactcataacatgagaataattctgttctctgttattttctaaggctcaatgcttactattctggagttcattactaagctgtcccacagtcaagggtttttttttttttttttttttttgagacagagtctcgctttgtcaccaggctggagtgcagtggcacaatctcagctcactgcaacctccacctcccggattcaagccaatctcccgcctcagcctcccgagtagctgggattacaggcatgcaccaccacactcggctaatttttgtatttttattaatatacattacatgatctcagaacacataactaacctaccctttctcaaatcacagggcaagattatatatgaagagacataacagcttgggggtgaagtcaaaagaatgcagccatgtactgatcacagactggttggattaatgtcacatcatctctaaaagtagatttttatcaatctaaggctgagcaaccctctacttatcttgtttccttatagtatctgagcaactaagaagttttgtaaatactgtctgacatatgtatattatacaataagatattattaactttaaaaaggagttaacaggttactttaaaatgcctaatcagaatatacattaaagccatcatatgaaacataatgttgatctatctctccttaaactgaatcaggagacattaggtctcatttccctatcacattagaataaaatactttggattaaaactccaggcagggcactgtggctcacaaccataatcccagcactttgggaggctgaggcaggcatattacctgaggtcaggagtttgagaccagcgtggccaacatggtgaaaccctatctccactaaaaatgcaaaaattagccaggcgtggtggcacatgcctgtaatcccagctactcgggaggctgaggcacgagaatggcttgaatgcaggaggcggacgttgtggtgagccaagatcgcaccactgcactccagcctgggtgacagagtgagactccgtctcaaaacaaaacctccataataccattaaaatgtaacaaagccagtcaaactttacagtaattagaaactctcaaataatgataatgaaacacatctaaacacgtctaagtcacaaatctaaaataaaatatgacttaggagcatccaactacagtcatccctcagtatccacaagggacttgtctcaggaccccatagataacaaaatctgcaaatgctcaagtccctcatataaaatggcaagtatcggctgggcatggtggctcacgcctgtaatcccagcactctgggaggccgaggcgggtggatcacttgaggtcagcagtttgagaccagcctggccaacatggtgaagccctgtctctactacaaataggaaaattaacctggtgtggtggtgtgcccctgtagtcccaggtacttgggaggctgaggcacaagaatcacttgaacccagaaggcagaggctgcagtgagccgagatcacaccactgcactccagcctgggtgacagaacaagacactgtctcaaaaaaataaaaataaggcggtcgggcatggtggctcacacctgtaatcccagcactttgggaggctgaggcgggcagatcacgaggtctggagttcgaaaccatcctggccaacatggtgaaaccccatctctactaaaaatacaaaaaattagccgggtgtggtggcatgcgcctgtagtcccagctactcaggaggctgaggcaggagaatggcttgaaccagggaggtggaggttgcagtgagcccagatcgtgccactgcactccagcctggagacagagtgagactccatctcaaaaataaataaataaataaataaaaataaaaaggcaaagtatttacatataaactatgcatatcctcccatatactttaaatcatctctagattatttttaatacctaatataactgccatgtaaatagttgttataagttattttttaaatttgtattttttttttctttttgagatgaggtcttgtgatgttgcccaggttggcctcgacctcttgggcttaaacaaacctcccgcctcagcctccaaagtagctggcactacaggcatttgccactgcacccagcttgttgaattgtgactagtattattattctcaaatattttattttttatttttgtgtggacagagtctcactctgttgcccaggttggagtgcagtggcgggatctcggctcactgcaacctccgactccctggttcatgcgattcccctgcctcagcctccggagtagctgggattacaggcacgcatcaccacgcccagctattttttttttgcatttttagtaaagacagggtttcaccatattggccaggctggtcttgaactccagaccttgtgatctgcccgcctcggcctcccaaagtactgggattacaggcatgagccaccgtgctcggccattctcaaatattttctatctgtggttggttgaatccacagatgcagcagcacctgcagatacagaggactgactgtattattacaaaacagcaaataataggctgggcgcggtggctcacgcctgtaatcccagcactttgggaggccgaggcgggcggatcacgaggtcaggagatcgagaccctcctggctaacacggtgaaaccccgtctctactaaaaaaaaaaaaaaaaaaaaaaaaaaacagcaaataaacaagtaaaaaatgacttcatcttagattggagatctctttccaaagactaataagaaatagtattgactcacatttttcccactggcttccatttaatgattttcaaaattaattttcaaaaacttttccacagaaaacactgtctccgtgggagggctgttcacaaatacttgtttttatccttctgggcatatggaaagattaaatttccccatcctgtttatatcccaagtacagtcaagagtcttcctttggccagagctggtgggtgaaagtggtgaatgtttctaggtaaaagctttaaaagccagagtgtagtctgatatggtctcttttctctcttaactaattaaccagtaatgttccgtgtaggagatcagtcagggtggtgggaaaaattgtagaaagatgtaaaccttcttggaaggctggaaggttttacaaaagcttcggaaaaagatttggctgaaggcagccagattgtcttatctggtgcctgaaactttaggttaggtaacaaggggatgtaaagaaactcatctaagtaagttagtttacttagaccatggaacctggcctaaatcatctgcatgcaagactagcggggggtgggggtgggcgcagcacgaccatgtgaattccccacaagtgtgttgactcaagacctttgtcattaaatctatactgaataaatgcccgcagcgcaagcacaggcttgtcagggcctcagccgctgactctttatacaccctcctcagtgtctgtgggcggcccagtcccctagcccactctttcactggcttcctgtgtctgagttcatttgttcatctgttgttcagccagggtctgcgggtcggacccggaaggtagagccctgtgtgaggaatgctgcaacagatcacaacagaacccttgaaaatgaaggtgaaaaaactgcggtcagtaagtcactgttgcctgctctgaatttccaagttcgagggaattgctcaggctagggtttcatcaagggacaacagttatcagctcaacagaaacagtatataaaagtatttaaaaagctgcttaaagctagtggagcctgggtttcacaggctcaattaagggacctaatgcaaactgttgtatcccataacccatggttcctggaagaaggtacactagccatagagctctaggaacaagtggggagaaatcttaaacatcatgcacaaggacaacaggtcccagtaacatctttaacattatgggctttagttagggcagctctggccccgttatacacagaagagcctaaaaaggggagggaggaggaaccatcatctaccttactgcctccttatccctcagccccgctatcaccgggccaaaataacaaagaggaaacggaggttttgcctgagccccctcctccaataaactagaagaaaagacaagggatatgctacagctgggggaccctgtcttaagcaagtggcattagaaggggagctcttagcctgcccagtaatgcaagaacgacaatgcaatcaggtacatgaacccatttcttttaatgcttataaaaagctaagaaaaagcattaaagaaaacagagccgctagcccatttccttacgaaaggaatgactgaagccttggcagacaacttccgtatgaccccatgggactggtcagtgctagctaaaacaattttggaggccagccagtacctcctctagagggcagaatacgatgagttgtgcgaacaacaagccaaccagaacgaggtggccgtgcaagatgtaacagctgctatgctccaggggaggcgtccccatgccgatgtacaacaactaattttgatccccaggcctatgcacaagtgtctttgtgcgctctcggggcttgggacagaatttccaaaagcagagatcaacagggatcttttataaatgttcgacaagggcctcaggagccatttgttgaatttatcaatcgtttaacccaggcaattaagagacaaattagtcacacccaggactgatatcttgttacaattggcttataaaaacgctaatgtggatcgccaacaagcaatgcatgcaatcagaggaaaggcagccacagtcagggaacttacacaagcatgtcaactggtggggactgaaacacacaaagccaaaatattggctatggcattaaggcctcctaaagtgaaaagggagggaaacccaaattgttttctatgtggagaggcaggtcatatgaagagggaatgtcccaataatagagaccaaggtaactcaggaaaagaacccccttctatatgactgcaatgtaaaaaggggaaacattgggcaaatcaatgcaagtccaaatttgataaaaacgacaactccgtaagtaaccaggcgggaaacttcatgaggggctgaccccaggccctgctgcaaactggggcaatgtcagtggctttcctctgtcagatggaaagcccacagtcctctctctcagagcaaccaccactgggagcgcaagactggacttactctgccccgatgaattagtgctaaaagaaggagaagacactaaaagggttgcaaccgggatctggggcccactgcctctgggaacagtgggattagtcctagggcaatctagcctatccagtaaaggaatcaatgtgctcactggggtaactgatagtgattattgaggtgagatactagttatgatggaatgtaaaggtctgcatatttcttcccccgggatcaaagacagctctgttactgcttttaccatactgggtccccaatgcccagaaagggggaaagggacgttttggaagcacaggagccacaaaagtacactggaatcaattaatcactaaccagagacccatgatcaccttaaaaattggaaataagaattttactggcttattggacacacggatggatatttcaaacattaatgatcaaaactagccagaaacttgtccttgggtcactcagaaacaaaaaattgttggcattggggaagcgcacacagccaagcagagcacgtgccccctaacctgttgcgattcagaggtaagaaaggcagttatacaacctcaactcatgcccttccctgttaacctttggggacgggacctattagcccaatgggggggtcactctgcagacctctttctaataatggccacagttattcctcccctacccttgacattgctctctcaaaatcctatttgggtagaatagtgatctttaaagggaaagaaattacaaacagcccgtgaattagttgaggggcaactaaaagccagccatacagaaccatcaaacagcccctggaattcacccattttcgtcattcccaaaaggtctggtaaatggagacttttgcacgacttatgtgctatcaatgctaatttgcaacctatggggccccttcagcaggggctcccctcccccacggccattcgacattggcctataatcgttactgacttaaaagactgcttttatactattcccctagcagaagaggacagagaagaatttgcatttacaataccagcaatcaataatgaaaggccagctccctgattccaatggaaagtgcttccccaaggaatgctgaacagtcctaccatgtgtcagtatcatgtaaatcaggctttctccccagtagaaaagaatttcctaatggcaagattattcattttatggatgatattttactagcagccccaacagagccagtgattttaaggttatataactctgtagcaaagaatacacagttaagaggtttaatcatagcacctgaaaaagtacagatgtcttctccttggaaatatcttggatacagactaatttcttgctaagacctcaaaagcttaaattagatactagcaacttacacaccttaaatgattatcagaaattactaggtgatattaactggctttgccccaccctaggcataactactgataagttacaaaacttgttttctatcttaaaaggcaatgctgccctagactctcctaggtatttaactcctacggcacaaagggaaattgaagaagtagagcaatttatctctcaaaggcaattagatcgcacagatccatgatattcagttcagctgtttgtttttcccactaaacactcccctacagggttaacaagacagatgggcccagagctatgctttctagaatgggttttttgctcacataccgggactaaaacactctctctctatgtccagtgagtcaataaagtcatctattcaggcctcagacaatgcaatcagttgctaggttatgaccctgatatcatcaggattcctttaagtaaaaagcaatttgaagcagtattacccttatctatggacctgcaaacagcactctctgattacacaggccttatagggcatacccttcctgctgacaaactccttcagttcttatctcgtacttctgttgttttgcctactaaaatagttcaatcccccatacctaatgctttaacattgtttactaatggctctggtaaacatggaaaagcggctgtctggtggagatcacataattccctcactcattctggatttactagcactcagagagctgagattggagccttaatattagccttagaaactttctccactcagctcatcgatattgttagtgactctgcttactgtttatttattgcagaactttgagacggccttcattaagaccactctggagcccaccctgtgtgcactttttctccgacttcagcaactgctagatcaatgtatacatcttatttttattacacacattcgggcccacagctcactgcctggcccactggcttatggcaatgatcaagcagacctacaggttatgacatcactgcctgaccaagccacccaattgcaacaatttttccaccaaaacttgagaaacttatctaaacaatttcaacttacccagagactagctaaacaaattaccctacaatgcccagattgccagttcacaggcacatcccctccttcaacaggtgttaaccctagaggactagaacctaatcagttttggcaaacagatgttacacgcatccctgaatttggaaaacgtagatatgtacatgtatccattgataccaattctcatttaattagtactcatgctcttcctggagagtccacccgatatgtcattaaacatcttcttttaacttttgcatttatgggacggcccacagaaattaaaactgataatggtctggcttatgccagctcacaatttcaacaattttgtcacacatggaacatccaacattccacaggcatcccgtataactcccaaggacaggccatagaacgtacccaatccagccttaaaaatatgctcagaaaacaaaaaagggggaatatgaataaggaccctgcaacactactagcacaagccttatttacccttaatttttaaaatttaaataaatttcaatcagctgtagaaaagcactttgctaaaacctctcaagaaataaaacctgcagttttatggaaagacgtaaacagtaatgtatggtatggtccaaatgaattgttaacgtgggggagaggatatgcttgtgttcacaccccctcaggtcctctttgtattccagcataatgcatcgaaccataccatggtgtggctaggacccaacccagtaccagaaataaagaaaataaccctatgggacccatagccccgaacaatgtggcttcatcagacaacacaggccccggacaggatgctcaagaagacaagtcagaagactgagtgaatcctgctctggacacagacaccattcactccagataatctgctccttgttatgctttattattatttatttatttatttattttttttttgagacagagtctcactctgtcaccaagctggagtgcagtggtgcgatctgggctcactgcaacctctgcttgccaggttcaagtgattatcctgcctcagcctcccaagtagctgagaccacaggcacatgccaccatatccagctaatttttgtatttttagtagagatggggtttcaccatgttagccaagatggtctcaaactcttgacctcgtgatccacctgcctcagcctcccaaagtgctgggattaattctctcactctgcctgcaactagtacctgctacactctatttggcccatcctctaaatccgcctttcttctgccctgttacttagacaaatacccgaccttcccagcttctaacaacgtgactgcttggctgagagagattaacataaccccagtggggttccttagtaacagcacacaatgaactgaactgctgagtaacaatataggtcactccttgattggaaaaaaaaaaatgttgattatactcaagtttgtcttatgttatttactaatgctaggatgcaaagctggaatatgagcagttaccaccacgcctgacaaacctactgcacatatctgtactctcctatcaacaaaacctgatgctaaaaacagaaaagggagagatgtaggagatcagtcagggtgatgggaaaaactgtaggaagatgcaaaccttcttggaaggctgtaaggtttttacaaaagcttcggaaaaagatttggctgaaggcagccagattctcttatccggtgcctgacagtttaggttgataaaaagggaatgtaaagaaactgatctagataagtttacttagaccttggaacctggcctttaatcatccacgtgcaggactactggggtgggagggtgggaagggggggagcgcaaccatgtgaactgcccaccagtgtgttgactcaaggcctttgtcattaaatctatactgaataaatgccggcagcgcaggcttgtcagggccgcagctgctgactctttacagcaccctccttggtgtctgtgggtggcctggtcccctagcccgctctttcactggtttctggtgtctgagtgcacttgttcatccatcattcagccagggtctgcgggttggacccagcagttccgtacaggggctgctcccatgtgaggtcccaaagtgggacccaaagtaaggatgacaaaaatgttgagctgagcccccagctgaccctcaatgaatacatggtatgagcaaaacatacaccttctgttgttttaagccactgagatattggggtttttgttcacagcctactcagaataatagtctacaactagttaaaaatcatgctgatgctgtgcatggtggctcacacctataatcccagcactttgggagtctgagacaggaggatcgcttgagcccaggtgttcaagaccagcctgagcaatacagagaccctacctctacaaaaatttaaaaattagttgggtataatggtgtgcctgtagtcccagctactcaggaagctgaggtgggaggaatgcttgagtctgggaggtcgaggatgcagtgagcagtgatcctgacactgcactccagcctgaatgatagagcgagatcctgtctcaaaaaaaaaaaagaaatcatactgaaaatacccaatgttcactctattcattttaagaaattaaaataaatactttaactatggacattaaactctcccatattacttctcttagagatcagaaaaatgaacccacttcccataaaatttatttaaaatagacgagtttattgtcatcccactgaaaagtatatgtaatacaaataaagaaataattctagtttactcaaatatttatcagaactctgacttagcaattataaaaaaatgtgggcaattataaaagcaattataaaagctatttagaatagcatctaaatttcagtggtttttttttttttaaactacattggccctagccccagaagattccagtgcacacattcatcacagagaatatatgtattccagtgcgtatagtcattatagagaatgatgaatataatgagaatatgagcaatgtggaggcagtgggaatgttaggaacctttgctctaactggaagagccacacaaaatcccaactgcactatgtgactctgagccttacctgtaaaatcagaaaaatatgatataccatagttattaagtttaaaaatgtaatatgaattttctggcacacagtagacaatcaaatattatctctgcttcctaagatacggtttgaaatttgtagaaaattgtatgatagcttcaatgccagaagacatgtctttataaaacaggaagagaaagccaaatgggaggctaggctgagatgcaagacaaagacaacgtgaaaaaggaaatgggtgaaatctaggactaccaagataatacagattcaactgcagaataaaatacttgcccaggagccagaggttgcagtgagctgagatcacaccactgccttccagcctggacaacatagagagaccttgtctcaaaacaaacaataacagcaacaaaaactgtgagacaaaaaatatttttaatagatactagagggaataaggaaaagaactactgatgtggctacagagattaaacctaagaagctttaccagaatgcaaagatactgagagaagatgacagacatggaaaatggagatctaaaaaactacacatcctcaaggaaccagaatacaaagaaaaaccaaaggtacaaattttaaaaacttgaaagagctgaaacaaaactggtacattattattacgtagtgctgaatcctttgtttaaatatctgtataatactttctcaattactcagagatactagaaagcaaggcaacaatattttctcttatccaacatccttaacaaactaatttggcaaattaaacaacactctccattctctccaacaaattactgaacattcaccactagtgaagcttactttttatcaaaccaatacatttatgttcccatcaacttaccgaaaattagttatatttataatttacagtttgtaacataattttttatgataaaataacattcagtttaaatattatataaatcagtaaaattgtaaatatgaagagttgattctataaaaatgaacctgaattttagaaaaactcaacagctagtcacaaaaactgttaaatcaggtacaggtgaatcaactgtaaaagactaggaggaaaaaatcatacgtctctagatggatcatatactcagactgctttacatctatatggtttttgtgtttgtttgttttctgggtttttctgtttttgagatggggtctcactctgttacccagaccggaaagcagcggcatgatcactcctcactgtagcctggacctcctgggctcaagcaatcctcccacctcagccttttgagtaatcctcccacctcagccttttgagtagctggaactaccggcgtgtgtgctatcacgtctggctaattttgtggggttttttgttgtttttttttttttttttttttggagagacagggtttcctcatgttgcctaggctggtctcaaactcctgggctccagcgacccacccaccttggcctcccaaagggttgggattacaggcatgagccatggtgcctggcctctatgttttcttaaacaaaataaacatttaaggtagaatgtatcatttgtattccccttatattaataacttttttaaatttaataaatactacctcccaatcacattaaataagagagcttctttgtacatcaaaatagacagaatctatgtggattatgagagatttttacaataactgataatgtttttggaatacttattatatgctaggcaccgtcctaaacatattatctcacttaaacctcatttaaaaaccccatgaattagacactataccccaattttacagaggagtgaggcttagagagtggagctcagactcacactcaggtctagatcccaagctcataatcttagctattcactacctttattttctttatcttttctgtattttaaagttttcttcaatacacattataagcacagtcggttaacgtataaggtttgttaacttagttcaactgttgatgactcttcaaggccttctggaaataccatctccactctggtacacagctggtactcaatgaattatatagtattatataaatgtcaaagaatgtttttatattgcttgatgaaagatatattacacatctaattttctcattgccctgataaagcaagaaaagcagcatgttaggagcacgtattctagagccaggctgcctgagttcaagtcctagctccaccacagacaagatgtgtgaacctaagcaagttgcttattgtccctgtgcttcagttccctcatctgcactacagatatagtaacagtaactaattccactgggttgttgtagggattaaatgaattaaaatcttaaaagcagtactgaaatcagtgcctagaacacagaaaattacatttaactaaagtaaaaccagtatctcgtgggagaaaaaaagaaacaaaggaaactcaaccagtaaattcaaaccaaaacttctgtaaatcatcaatgattttgggaggcatcaccttttaagtaatcttacagcactgcaaaaggagatccctgctgtctgcactgtgctaggtactggagtaccaaacaacaaaacgctgcctctgttcttgatgagctaacttactactgaacgacacatcaatgattatagtgcaatgtggcaagtacaatggtagaggcaagtgtgcacagagtgctctaggagcattctcagtgacaataaagggacctaatttgagaatgatccaaagaataccgataaaatatattaaactattcttttgtcattattaactattaaagttcacactaaatgactaaccacacaaatggaaaaaattccaaagtttataaacctcgtagtgctttttaaatttatggtactatgaatctcaaacaaataattgttgaccacttgtaagaaaaccagtaagctagtgacagtagggaatctaaagattctaaccctatcctcctattagttgggaaggcaaggtataaacaacaacaacaaagtaagagttaagacctaatcttaactctttaacctaagagttaagtaacaataaaggcaacaatacaagaaatattacaaagcaaccatgtaattaactaccaagagaaatatagtcaaccaatgttccaaatcaatcccaggaatatccaagacaaaagacaaacttaacatttcttgttaagtgtgtgtagatatagatatatagatacatctcacacaacactttgagaataagaggaaaggttttttaagttcaattttgtattacatacatttgatttacttataactggcttcataaaaatgaagttcactacaaacatatctcatcagaaattcattctttattcataaatgtttactaaagcaatcactatgaaataagaacatgcagtaaagtttaaaaatttatccttctttttttcctgatttttgatacagggtcttgctatgttgcccaggatgccctccaactcctgggctaaagggattctcctgccttaacctcctgagtagttgaggcatgcaccacacagcccagctcaaaaatttgtaattcttaaacttcatataatggtaggaatgatcttctgactctcaatccagtgttcctcccattacatcagaaaatagacaattttctcaaaatgtattttagtagatccacccttcctttatattgtatttctgggttattcttgtgcagtagatgttatctaagaaaaatttaaatgcacttcttaagagtacagaagaccagcattgagttattcccatttttcaagccaggtttcttataaaattcgtaacaaacgatactttgaatactttgttaaaatctttaaaatccacaaaatcagattctgattaacctagctggatattttttaattcctgtgatttgtttccatctatagaccaacaaacatttattaacactgaaatttaaaagttagcctgacaaggatcagcaaaagataccacaactattaggtaaaagatcactggagaacaggctagcattacagtgctaatttatcatgccacagattacttgctgactgcagtgagaaaaatatacctcaccttactcctctcaaccaagcaatcaaacttagtatcacaaataatgggactgcacagtgtacgtctcctaatgggaggcatataaaatatattaaatcacttattaggtattcttgtccaaaatgttgaaattaaaactaatcgaccctttaaatctagtttacacttaacaactggtatgggggaatacaggaacaagctaaacaatgctatgacggggggaggggggtggaatctgacaaatcgagaatatgagtcactttataagacaactgtcttgatctcttaaaaaaaatcattgtcatttttaaagggtgtaagaggtgagactgctgtagactataagagatcaaaaagccttaacaactaaatgcaatgaataaactttgatgaaatcctgatttggtggggatgggtgtacaaaccacaaatgacaattcagtacgaatgagatgtaaatatggatatatattagagtatatgaaagaagtatcgcacctaagaaaagtaacaataatggtattttggctatgtaagaaaatgtccttaactttaggagatgcatgtgacatattgagaggtaaaatgtcataatgtccatagcttagtttcaaagagttcagctgaaaataatatacaagtatatctcattttattgagcttcattttattctgcttcatagtgttttttaaaaaaagatatctggaagtgtttatttctcctttatttttgaaatacatagttccaggatctagaattctagtttgatagttttcttctttcagtagaggtataccttgttttatttcacttttcattgtgcttcacagataataatgtgttttcttacaaattgactcactctattgcccaggatgaagtgcagcagcacgatcttggcttactgcagcctccatctcttgggttcaagcagttctcctgcctcagcctcccaagtatctgggactactggcacctcgtcccactaatttttgtatttttagtagagacagggtttcaccatgttggtcaggctggtcttaaactcctgacctcaggtgatccgcctgccttggcctccccaagtgctgggattacaggcatgagccactctacccagcagatgtcggtatattgataggggttgccttcaatctgcagattgctttgagtagtgtattaggccattcttgcattgctcttaagaaaaacctcaggcttggtaatttataaagaagagaggtttaattggctcacggttcagcaagctggactggaagcatggtgctggcacctgcttggcctctggtgaggtctcatgacataaggcaaagtgggagcaaggacctcacttggcaagagcaggagcaagtgagagagtggagagatgccacacatttttaaacaaccagatctcacatgaacttgctcatcatcaaggggacgctgctaagccattcatgaggcacccacccccatgatccagtcacctcccaccaggccccacttccaacactggggattgcatttcaacatgagacttggaggagacaaataaacaacccatatcaggttgtatggtcactttgacaaaactgattcttccaatcaacgagtatgggatgtttttccgtttgtctgtgtcatctagaatttcttacatcaggactttgtagttctccttatagagatctgttacctccttggttaaatacatttctaggtggattttttctttttttgaagattgctttcttgatttagttttcagttggatcgtcattggtgtatagaaatgctcctcatttttgtacactgattttgtattgacactttactggattatttgtcaaattcaagaggtttttggtggcatccttaggtttttctaaatatgacagagatcatgtcatcagggaatagggtattttgacttttccaacttggatgcatttcctaatttaagaaatacagccaggacagtggctcatgcctgtaatctcaacattttgggaggccaaagtgggaggaccatctgaggcaaagagtttgcaaccagcctgagcaacacattgagatgctaactctaaaaatagaaataaaaataaaaaaattaggctagcctgagccaggctcagatgttcttctagcatttttttggcaacaaataatttttttttttttttttgagatggagtctcgctctgtcacccagactggagtgcagtggcgccatctctgctcaccgcaagctccacctcccgggttcacgccattctcctgcctcagcctcccgagtagctgggactacaggcacccgccaccatgcccggctagtggttttttttgtttgtttgtttgttttgtatttttagtaaagacggggtttcatcctgttagccaggatggtcttgatctcctgacctcgtgatctgcccgcctcggcctcccaaagtgctgggattacaggcgtgagccaccgtgcccggccaacaaataatttttaattgatatatatatatatatatatattgcttttttagaatgtcattgcacacttaacagactacagtatattgtaaacataactttatacgcactgtgaaactaaaaaaagaaaaacaaacgaaatacattttgtaaggctataactaccatagacagtgatcagattcttctgacagatctgagcaaagtaaattgaaaaccttctggaaaggattcatcattctagatgccattaagaacactgatgattcatgggaggaggtcaaaatatcaacattaacaggaatttggaagaagctgattccagccctcatggatgactttgaggggtttaagacttcagtggaggaagtaactgtagatgtgacggaaagagcaagagaactacaattagaagcagagctaaaacttgaacagatgaaaagttgcttcttatggatgaggaaacaaagtggcctttttttttttttaagacagggtcttgctctgttgcccaggctggtctgcactgccacagctcactgcagccctgacctcccctccccggctcaagcactctccctgcttcagcttcccaaatcaccacaaccggctaacctctatatttttttaatgggattttgccatgttgcccacgctgttcttgaattccttggcgcaagcaatcctcctgcctcagcctcccaaactgctgggattataagcgtgaccccattacgcctggacagaaagtggcttcttgagatggaatctactcctagtgaagatgatgtgaatattattgaagtagcaacaaaggacttagattacaaaaacttagttgataaagcaacgataagcaacttagatgataggtgataagcaattagttgatgaagggtttgaaaggactgactccaattttgaaaaatgttctatggtgagtaaaatgttatcaaacagtatcacatgccagagtgaaatctttcctgaaaggaagagtccatcgatgcggcaaacttcactaatgtcttactttaagaaattgcctcagccatcccaaacttcaacaaccaccccttatcaaccatccttactagtcagcagccatcaacatggaggcaagaccctccaccagcaaaaagattacaattccctaaaggctcaaatttctttagaaatttttagcaataaataattttttaattaaggtatatactttttttagacataatgccattgcacacaatagactacagtatattgtaaacataactatatgcaccgtgaaactaaaaagtttatgtgactcacttcttttcctttattgcagtggtctggaaccaaagccacaatctctctaaggtatgcctgtacatgtacctatagataaagcaaatatggcaagataacaacaaatgtttaatctagagggtcaagatacaagtggtttactattaccaaattttctgtatgcttgaaattgtttgataataaaaagtgggaggtggggggaaatagctccaattctatagggaaagagaaaatcaacctgaaaccaacgctgtaggaaatgcagagtatcaaacatgactttattttaatacagcacctgttagtttaaccctttggtaccaataaagtaaactagaaacaaaagctccccctaaaacattgcttataagactcagtctctaatgcaatccaattatttaagataagcctttaacagctagtttctcaaaagaggcacatggataaccattctataatgatatcatatacaacataattcaataagattcaacatgtttatattttaaccaaacaacaaatcaatctgtaaaccatccacatgttaactttgtaatttcaccttttctccacagagactgcaagaccacaaattttcttcaacttgataatatactaggaaaattacagagtaatataactgggcatcaatagatttgttaaacatttgcaattatgcatagagcttcaattactcaaaggaaatgtatcgactttttttcagtacagagctctggctccttattttttcctctcaccatagttttaaaaaatacaaaactcatgctaaaatgagaattttcagttaacttataaacactgactagtagcactccatacaaatgaaaaagaatcacaccatcaaacttcctacgatattctacgcattaaaatttgacatcgaactaaaaaagattgcataagacaacgaacaaatcactaaattgccacataatccagcaacaaattttgcaacaaggaaatctcaagcaaataacccaactgtgagttccctttgggcatcaaggtcaaactacaaaagtaaatttgtgacttttcaagatctatgcagttttaccaaatgtatttattttttgtgagagaataatttttttctgtccagtactagtacataaaaagtaaaggtatctgaagccatcttttaaattttttttaaagccaagaaaatgatttggcaaaagatatcgaagagcttacgttagggaaaactaaactgtatctgtctatgtgtttagaatttatcccattaaagaaactgcccagttagtctcattttctaaacgtatttattttttgcaagacgagaaatacagtcttacaaaaagacatctgcatattcgaaccaagccttcctggattactaccttcatgaccttggacaaatgccttaatctctctgagcctcaagttttcacctgcaaaatggggcaatttacccacctcattgagctgggaagatgaagagagataatgcatgacaactgccgggcgcagactaagagcaccctaagtgctacctaaatattccgtaaagagaaaagggggaaacaaccttacatcaaaagattaccacactgtgacagtgcaaagacaagcactttttcgcttactgcatgtaccatttctgcttcatcccaagaccagatgcaacctttcttctaaaatctctgcagggtacgtgtctgacagctaacacagcccagcagcctacttcgcgctgacctgggctttaggactggatgcagggggcccaaggtccgccctcccgcagctaggcaatcacccagcgaaatctccgcccctggagcggcgcttaggccgccgccagcccccctcccggcgcccagcccgcggcccccgacacacacgcgcgcacacacacacacacacacacacaagcgcgcgcgcacgcacacacgcacgtaccggctgctccgcagggacgtagagagccgcaggcccaaggaggggccgcccccgccgagcccgcccctccgccccagcgcggcctgtcaccgcggccccaggtcgggggctgccgcagggcccccggggaccggaggggcgcgcgaggagtcgggcgcgggccttggggccaggcccgtccctctttcacatgaagcccgggccgggcggggtggcgggcgcgtgaatcctcgcagccggccgggtcctcctggcgctcctcggcacttctagccgctgcaaccccgaggcccgcgggaactgggcaggaaaggaggaagccgcgggcccgcgtcgctagagaccggagaagaggcgggagtggcgactctgcggacaggggcgccgagcgtcctggtcgttgttttcgtcgccgccgcgggccgtgcaacccccgaacgctgcgcccagcggccgcggcaccctcgtcaggcgccgccgctgagggcaggcagcccggcagccactacacacggacccgtgacgtcgggcgtagcgcggcgcacgtcacggccgctcgctcgtgcgcgcgcacccctccgcccggcggtagcggaacccgccgcgggcgcgcgcccggcccaggggagtgggtcggcgcctgcgcagaggcccgccacgcccacacacaggccaccgcccccaccggccggacggcgcggggattcccagtcctggctccgccccggcctcggccccgcccccgcccctgccccggggcagcctgtgctgttccgtgtgcgcggcgcatacgcacctgggttgtctcgagcctgcggtagtggccagatcccagacatccgagtagatcccgtgaaaaggtctcccacgtgggctgtggacagggcccaagggtagcagagctagcagaggcagtgacggactgtgtggcaggtcatttgcaaggagaaaagccgtctgcctcttaatttgtggctcaagtttcagaatttttttcctgagggactttagaaattacttcaggcttgccacctaaccttaaaccacccccttggagactggctaagtgttatttgtgttttctgtttagttcttatcaccatcgatacttggttatgactggttgtgtacattggttagcccagcaagtattacttctccagcttaacagatgtggaaacttaagcccagagacatgagttgacaccccacccccaaagctagagtctaaaaccctttctttcgctcctcatctcccacaggataaaatgcaaattaatcagactagtggtgaggccctccgtggtgtgactaacctgcatcccgacgttttcaccctactttgatccagaaagcacctttccgccccatctcttctcctttccttaaataccccttacaacttcctgtaccattcttccctgttcagcttcttcttggtttcttcgtacattctggatccacccctttcatgcatattccagaccacatttccactggagcagttgaaatgagagagatgggaatgggactcacccgaaccagaggtaaggagctacccaacttgggctctgagggtcaagggagctggcacttgtggggcagagactgagggagaaactgttgtgtaatgtcaaaatatctctgggtttcttccaggaatttttattacagacccattaacagaggtgtcaaagtcacaggaacaaggatgtgcacctcagaaacacagaggtcagtggaaaatcagtttgcttctatttgtttaaaaaatgggggacttatgcataaatctaagaccttcttgaatctaacattctaagacctgtatgccacagaaaggagggtctcagaacgccggaggatagtatttaaatcttaaatatctatattgttctccacagttactgggtcaccacatagcaggcattcaataaaaacgtgtttgtttactaagtaatctagagataaattttttcccctcatagtgctgctcatttctccactcccttccctcacttaccaccccggggacttcattcacctctgggttcctcagaaacatcccgtgggtatagttatagtagctattctttctttttcgccattctccttttatattggtgacttttcctcttgcttagatattaaatctctgacatctttggttattttagtatatatgattacaaattagtgatattgggatttttttattgatgaaaccatcattcaatgaatatttttttgccttcctactctgtgcctgggattgcagtgataaaattatatagtccccactgcccaggaactcagaatcctgtgaggaaggcagacaggtaaatggataatgataacacactgtgacctgcatcatgggagggatgtgtatcaggcaccacagcagcaagaggaagatgtcacaggtgtgtctggggaagtgagagatgacttcagagaggaaatgtggcatgttccttttctgttgctgcataacaaactgccacaaacttagtgacttaaaacagtgtctgttttttagctcccagttatacagatcagaagtttgcacaggggcaaggctgagttctctactcagggtatattgcaaggctgaaatcaaggtatcagctgggctgactttttatctagaggcccttgcaaagatcttccaagctcattcttctttggggcacaattcagtttcctgtggttgtaggattgacatccctatttcctgggcctgccttcagttcctagaggtcacctgcattccttgccacatgaccccttccatcttgaaagccagcgacagagaccttcttgcgtgccaaacatcctcctacatcagatctctctctaacttcctcttttgctaccagccagagaaaactctctgcttttatttttatttatttttttatttttgagacagagtctcactctgtcgcccaggatggagtgcaatggcgcaatctcggctcactacaacctccgcctcccaggttcaagtgattctcctgcctcagcctcctgagtagctgggattacaggcacccacccccacgcccagctaagttttgtatttttagtagagacaggttttcaccatgttggtcaggctggtctcggacccctgacctcgtgatttgcccaccttagcctcccaaagtgctgggattacaggcatgagccactgcacccggcttttagagagttcatatgattagatcaggcccactgagataatctattcttaacatcaacagtgtcacataacataacctgatcataggagtataatccattatattcacagtactgagggttatgcaggctatgtacaccagccgtcagggatctgcagggacatcttagaatcttgctggccacatattgtgccatggctggcaactgaaacttgaacgggggtagttatttgctggaagaaataaggatggaggagtacgcattccaggcagagggaatcaagtgtgtccaagcttggaagtatgagggaacgtgccctgcctaggaatggcaagagttgctggccactgggtgttgagagaaatgcaggcagggggtgaagctagagaaggaagagagctgccaggagattgggaaggaggaatattagagcaggccaaattgctgggaagggagatgaaagtctaaaggtctaaaccacagctgtggccatgaaaatgatacgagtactattggttgggatgcattcaactgcagcgagcaagacacctggcccaaaacagcttaaacagtgaggttgattttgtcacataacaaaaatccagtggatggatccaaggttggttagggctgtgaacaggcatattgagaatcaatggacggccacctcagctccaaacatgacctcccacacagtaaagaagggggaaccatccctctgtttctttccctcattcttttttaaaataaactttttattttagaatgttgacgaaagagtcaaactctataaaatatttgaagagatttgttctgagccaagtatgagtgaccatggcctgtgatacagccctcaggagatcatgagaacatgtgcccaaggtggccagattacagcttggttttatacattttagggagacatgaagcatcaagcaatacatgtaaagtgtacattggttcagaaagtcaggacaactggaagtgggggcttccaactcatagatggattcaaagattttctgattggcaattggttgaaagagttactatcaatagaagataatttctgggttaccgtaaggggttatggagaccaaggttttatcatgtggatgaagcctccagatagcaggcttcagagacaatagattgtacatgtttcttattgaacttaaagagtctgttctgtcagaaattccaaaagggaagagggtagaatgaggcatgtccagctccccctttccttcacagcctgaactaggtttttcaggttaacattggagtgcccttggccaagaggaggggtctattcaggtggttgggggccttagaattttattttttgtttacaagaacagttttaggtttacagaaaaactgagacaatagtacagagacttctcctatacccacattcagcattcattttctcctattgatatggtttggctttgtatggccacccaatctcatgtcaaattgtaattcccagtgttggaggaggggccttggtggaggtgattggctcatgggggtagatttcccccttgctgttcttgtgatagcaagtgaattctcacaagatctggttgtttaaaagtgtgcagcacttccccctttgatgtttctctctcctgctctgccatggtaagatgtgcctgcttccccctcactttccatcatgattgaagtttcctgaggcctcccagccttgctttctgtacagcctgtgtaactgtgagtcaattaaacctcttttcctcttaaattacccagtcttaggtagttctttatagcaatgtgagaacagactaatacacctattattacgaacttgtattattagtatagtacatttgtcataactagtgaaccaatattgatgcattgtcattaactgaagtccatactttattcagatgtcctcagttttttcctaatgccctttttgtgttccaggagcccacactatgcttagtcatcacgtctccttaggcttctcttggctgtgagttcccttgtttttgatggccttgtgctaaggaatactggttaggtgtttggtagaatattcttcaattgtgaatcatgtaatgtttttctcatgatgacactgaggttatgggttctggggaaggagaccactgaagtaaagtgccatctttatcacatcctatcaaaggtagtccattgtcttagtccattttgtgccctgtaacaaaataccacagactgggtaatgtgtaatgaacagaaatttatctctcacagttctgaaggctgggaagtccaagattgaggggcccacatctggcaagaaccttcttgctgtgtcatcctgtgggggaagggcaaagagaagatgagagaaagagcaagaagagtcaaactcatccttttataaggtgcccaccctagataatgacattaatccattcatgacggctctcccctcataacttaatcataacttaaacacctcttaaaggtcctacctcctaacattgttgcattggggatcaagtttccaaaacatgacctttgggggacatattcaaaccatagcaggtatatactgtcagtatgatttatgacttggtgttgagcttgatcacctgcctgagatagtgtttgtcaggtttctcccccataaagctactctttattcacctctttccatactatactctttgcaaggaagtcactatgctcagcccacacctaaggagtggggagctatgctccacctccttgtgtgtgaagtatctgcataaattactaggaattcttctgcatgtgagatctgtctcttctctcctgtttacttatgtaatcttttatttatattaatatagaattgtgggtatataacttatgctctgggttataatctaatactacattacttattttgttgctctaattattctgggtttggccattggtagctctttgatttgtctcctgtgtccctttgacacccatcattatgattttttttttcctttttcagcacttctttgctttctggcactgccagcgctccaaaatcatcttgaatatttcctgtcccagtctagaatcagccatttttccaaagggccctggtttcttttgttggagaatggtgttagagaccaatatctggtgctaggtgtgctaaggattctcttttcattaaggatagtatttccagggccaggcgcagtggctcacacctgtaatcccagcactttgggaggccgaggcaggtggatcacctgaggtcaggagttcaagaccagcctgaccaatatggagaaaccccatctctactaaaaatgcaaaaaattggctgggcatggtggcatatgcctgtaatcccagctactcaggaggctgaggtaggagaattgcttgaacctgggaggcggaggttgcagtgagctgagatcatgccattgcactctagcctgggcaacaagagtgaaactctgtctcaaaaaaaaaaaaatagtgtttcccatcagcctcccagaagactacccattttgtttttgcagcaatgtctgctaattgtgcccccaaattcattctcctcttcccattgtaatcaaattttatctgagcatataggactctcataataaagagttcattccctagcctcccttgcagctaaatgtgaccaggtgactaagtaatggcaaaagggaagtcaactgaagtgtgtccatccagggaccttcactgagagtccctttcttaagagactactgcttttacatctttcctcgtcccttcctcccacactggagtacttgcaggccatcttggagagtcaggacatggggcatacacaggaatggtggctctgggagcagaatcccctccctaatctggaccacagggctgtgtagtttctcatgggagatgtaaatgactgtccctggtagctgaactgactgctaatagtatcttgttggctggagttgggtcacatggttatgcatgcatagaagtcaggatcaccatgatgggttcagcccacacgaggaccaccgggggctgggcacactgcctggctatatctaagcagaagccggattaggttacaaaggagctgagagatggatggttgttgcctagcagccaactgtgttggctctgagaagctcatggagaggcaagacttgggggaccagagtggactgtagggcctaccccatatataaatgatgttccacaaatctattatgattatccccagggccacttcactgttacaagaagcaaaacattagtaaatctgatttttaaaagttcacagtgctgccacagccaaacaaaagttatttctgggatttctgctgtgtggaatgcccacaaagttttctaagtgtggaaagaggcaatgtgacaagatttctaacagacagttgtcttgaattctctgtgatcttgatcagctctaattcttttatccatcagttgctagtacattaacttcttactttaacattatgtttgttatatattttccattgttacacatatttataatagaaaatatggaaaacaggaggaaaagaaaaagctcattccttctatagttctgtttctattcaattttttctctattcgtaaatctttgttgtgctggtatttttttatttttagatacgtttttaaatcgttcttaggtattaatagttgtgatctgtcctatacatgcaattttgtatcttacagttttcacttcacatggcataagtagtttcttttttctttttttttttttttttgagacagggtgtcgctttgtcacccaggctggagtgcagtagtgtcatctcggctcactgcaaccctcacctcccaggttcaagtgattctctcaccttagcctcccaggtagctgggattacaggtgtgtgccaccatccctggctaatttttgtaggcttttttttttttttttttttgagttgaagtctcgctctgttgtccaggctggagtgcaatggcacaatctcagctcactgcaacctccgcctcccaggttcaagcaaattctcctgcctcagcctcctgagtagctgggattacaggcacgtgccaccatgcccagctaatttttgtacttttagtagagacggggtttcaccatgttggccaggatggtctcgatctcctgacctggtgatccacccacctcagcctcccaaagtgctgggattacaggcgtgagccaccacgcccagccggaaaaggaaactcttatacactgttggtagaatgtaaattagtacaaccactgtggaaaacagtatggagatttctcaaaagactcaaaatggaactaccatatgatccagcaatctcactactgggtatttatccaaaataaaggaaatcagtatatcaaagggatagctgcattcccatgtttattgcagcactattcacaatagccaagatatggaatcacccaagtgttcatcaagagttgaatgagtaaagaaaatgtgggccgggcgcggtggctcacgcctgtaatccaagcactttgggaggctgaggtgggcggatcacaaggtcaggagatcgagaccatcctggctaacacggtgaaaccccgactctactaaaaatacaaaaaaattagccaggcattgtggcgggtgcctgtagtcccagctactcgggaggctgaggcaggagaatggcgtgaacccgggaggcagagcttgcagtgagccaagttcacaccactggactccagcctgggcgacagagcgagactccgtctcaaaaaaaaaaaaagaaaagaaaatgtggtatatatacacaatggaatactatgaagccattgaaaacaatgaaatcttgttatttgtagcaacacggatgatcattatgttaagtgaaatactcaaggcacagaaggaaaaatattgtatgttctcactgatatgtggagctaataaaacatttgatctcatggaggtagagagtagaatgatagttaccagaggctgggaagggtgagcggtgaggaggacgagggaaaaaagagaggttggttaatgggtacaaacatacaattaaatagaaggagtaagttctggtgtttgatagcacagtagggtgactatagttaacaataatatatatattgaaatggttagaataaaagttctgaaagtttctaacaaaaagaaatgataaatgttcaaagcggtagatatcctaaataccctgatttggtcattgcacattgtatgcatgtatcaaaatatcacatgtacctgataaatatgtacaattattatgtattgtctgggcacagtggctcatgcctgtaattccagtactttgggaggtcgaggcaggcggattgcttgagctatagagttggagaccagcctgggcaacatggtaaaaccctgtctctacaaaaaaaaaaaaaaaaaaaaaaaaaaaagcctgggcctgggaggcagaggttgcagtgagctgtgattgtgccactgtactccagtccgggcaccagagtgagactctttctcaaaataaaagttattatttattgataaattttttttaaaaaaatgccaaattgctaacaaggataacccatttttcggaagttggctatttgctgggagcctacttatgttctccaccactgcagcatccccctaatggtctgatggtccactccttacttccagtgtctttgtcttgacagcaagaagagaattgtctgtttcttccctttctcctgtttaattatcttattgtcttcccataattttcaattcacatataaggaaaaagtggcagagaaaggtcaggtggctgtcaccaggccccaaggacacttaatggagcagccagagaggacctcagaaccacctgacaggctctccctcactctgttccatggtacctcccaaatgcccatcccagagcccctccccactgcctaatgcaccagggcaccactccctgtcttgccaatttcagctgcccctctgcctccaagatcagccttgccatccttgacaccacaggcttccttcatccaagccctctgagcccctctctgggcggtttggaggatgctaagccctctcagtgcaccatccagggggtccatgttgcagaaatgagtgaggaggtagttatcttcatcctcacagctcagcatatgcctcgacccagtgcgatgtagatccttccccaactgcttcctgcaagtcaagtcacaaaggttggcattggttcttcaccataggctagcctggctgaagctcagctgcacagagtctgtcctgagaagcagaatgccactgtcccctgggccctccagactgccaaggctgctcagtttcagagagcaggctccctgtggcctcacacgccggctgccagctgggccaggtaactctggccaggctgcactgtgaagaacacgagagtcggcggagacctgtgcctgctcttctcagcctcaatgtctggaagacaaaaaaaggcatcctgctcccaagattgtggtggaggccagcagggtgacgcacatgaaagccactggagatagatggcacttgttcccacccactgcccacaacaggcccaggactgcctcagccccggtggaccccagagccagcaggcccttcagaatggaaggtgccaaacaccatcggaaggcgtggttcttttcagagaaccagactctgagactgtggcctcccactatgagtcaccacctctgattcctgaggtcccctccagtcattggctctctcccaagccagccagctgatcagccttgaggacagcagagtgtctgccaagagagatctgtgaagtttcccatcaccgtggcagtccacaatgtgaagcccctgaggccacccttctccatgtgtcccccacactgtccctgaccctcccaccatcctagaaaaccagcctcccaggtcctctgtcatggaagtaatttacagcaaggcagaaagagctgaaagatttataaatgtgtaaaatttacaaaggtgtttctttctttctttctttctttttttttttttttttttttgaggcagagtctcactctgttgcccaggctggagtgcagtggcacaattttggctcactgcaacctccgcctcccgggttcaagtgattctcctgcctcagcctcccaagtagctgggattacaggtgcatgccaccacgcctagctaatttttgtatttttagtagagacagagttttttgccatgttggccaggctggtcttgaactcctgacctcaggtgatctgcctgcctcagcctcccaaagtgctgggattacaggcgtgagtcaccgtgcccggcctacagaggtgtttctgagtggagaaaccactgcctggttggactgactgcccagttccaccaccctgtgagcccatgagtgagctcactgcacttgttatagacatcctaccaccagcagcctgattttgctgagtccgtagcttacaactccaatctcatggccctgcctttcacctcacttgctgccttaaaaacctgcagactgaggtggcgtagaagctgtgacatcccagtacccagaagttcatctcacacccagatcttggtttctaaatgtcattctctactaaaagggaccagggctggtacaggagaagagcaagagcttggaatatcttatacctgagagtaaggaagtgctcagagaatcacaggagcacgttaaaaggacatagaagtcagtttaatgagactgcttctggccaaagttggaacacatcaaacattaaaacaatgatggtaatggattagattccatagaataaaatccttgaggacatagttatataaacataactgaggaagaaggaaaagctctccctaacagaataatacaactagtaaatgggaaaggaaaggagttaggaattcacgctgggtattgaaactagtgggtgaaagctcaatgaatcggattcttagtctcaatgtctctcctctcaatttagtaattatagtggagtaatcatgactttacagtggagaaacctggccaacactaccttcacaacactaacaaaaaccttgcagacctgcagcctaagctcccagaagtcacctgctgaaatgccttcaaagagtgacctctctgcgtgtagtgctcagcaacttgggctcagtgtctatttccacaagctacaaaccagaatacagtggaattcagcccatatgtggtaatttatctaccaatcaaggacctttgactccaaaaattaccttttttgtacaagtgactacctggtgtagagctcagacatggctttgaatttttgccatgctgtgtgagctcaggcaagctgcttcacctctttgagcttcaatcttttatctataaaatgggaataacaataacttaatgaaacagcaattccagtgttaggtatttcctcaggagaaatgaaaacacgttcacacaaataattgtacatgtatgtttctacacgctttattcataatagtcataaacaacctaaatattcatcaactggttagcagagaaaagagcaaaccactgatgacatgaacgaatttcagaagcactgtgctcagtgaaagaagccagacaaaaattacatcttacataaatttcatttatatgaaattctagtgaaggcaaaacatatagccaggggccaagaggggaggatggtctgcaaagaggcaggaacttcttcctggggtgatgggaatattctgtgtcatgaacatcgtgattgtggttacaagactatacttttgtcaaaactcatcaaattgtacacctaaaatggatgcattaagcctcaatacagccaataaaagatacctacgttacagtatcttctgaggagtaatggggtgatatatatgcagccccaagttcagtgcctgtggtgagaggagtcctaaaatagtacctgtgaccacgccccacggtcttagacctgggcagggcaactgtgcagacagcaggcccagccaggaagcaagctggcaaggcgttctgcagcgaaggtgagtaccagtgatgcaaggtggaataagaaaagtgccctttggaggagtcacttatgaggggaatggggagcagggcagcagaggcccctctgctgctgggaaccgggcgcactcccgccagtcgcaggagctggctccacccgccccttctgatccagtgtcccgcagtcctgcccgcttcaccgccctcgcctagcccccgcgggtggtaaaagtccagcccggcggagcgcccctgcctccttccacgcccctggcctgccctgcgcagctacgcccagcccgcgtccatcccggaccatcctgttgaaggcagtcccctggcacgcagggctgggagctcttagctgaggatggaaccgactgcaccaggagccgctgggaggaaggccgaggggcgcagaggagaggcaaggaaaaaacagcagcccaagaatcgggcctccctgttacagcaggagtcgcatctatttatatatgttatgtcttattgctcagcaaccagctctcggccggggcgtgggccgggaagaggggtctcctggtgcagcgggttggcgtgactcatcaccgccgcgcactctggcctctgggcctaggttaacagactcccgggtttcaggctgggcccaggcggccaggccctccctgctgaggaatctgggttggggcagtgccagctccctgcttctcacctggccacagaaggggtagcgggaggagcgtgggttcatggaggcaggtggaccaccccttggctcctggctctgccacctgtccactgtgtagccctgggcgagtcacagcctctgacatcagcctgcttatactgtaaaaggagtgtgagatcatgttggaggagacactacagtgaaatctaaatacattttaactcttcacacaccctctcccatgcatttgacagcgaggaaactgcagcccggggcaaagttgactcacttcccaaagccaactaatttgtacttagaagaggcaggatttgaaccggggcctctgtggtttagagccctgtgtatcttatcactgtaacgcctacctcatgccctcaaaatgcctacccatccgaggggtgcagaacttgtgggttcctgggctcacccgatgggattctctaggggcagcccctgcaagggtggggaaatacagaattctctctggtgtcagggtcgtgtgtctcagtcagaaaagccctgccccggatggtctcaggaatgaggtgcagctgcctgcccacctcagcctgccttcccttgctatcagccgttcacttgagatgctaaccccctgttatatacctgagtcacctaacaggatgtcttccaagcactgcacagtgtcaggttttgattaccagcttccttatggctacagaaatcccttgtttgagtcaatgtggtggatctagatctggccgtgtcactcctctactcacagcatttgcttacagggctaaatttaaactccagtttgtggcaagtacagaaggcctccatcatgtggcctctgcatccccagctctccttgtcattgtcatcagccactcttctccagcccccaaattctcaggagctccttgggccctcccatcctgcaggcctgcaggcctccacgccaagctctcctaagacgctcctggccttaccaggctggcatgagccttccttctccaacagtggcagagcactgtgccaggaggttctcagagcttgttacaactcaaggaggcaggtcccacccccttttatggggaaggaaactgaagctcaggaaggtaaccttccaaaggtcacattcccgcttgcctcagcaccttccctgcccactctgtgcacatctccattactgccaggtcctgcccaggtatggctgtttgtatgtctgtctctctaggtgactgatggcccttccccttgcatgcgtgctctcccactactactatctaaggacatttgctgagtaagtggatggatgaacagattatggacaaaacatttatttaaaagagcttaaggcctccataatcaggaatttggggcttttgaataagggcaggaaaactctggtttaagacccataggctaatttcatccagctcttgacacttaaattaaaagtctacccttattattcagacctgtttctctccatagctataaaaatgtagcatggtttgacaggcccttagtaaatgcatcctggagagctgcagcctttgggcactcatttccctttttagggcctcagtttcccatttgcacaataagagtatggcaaactagcaggaaataacctgcatagaatagaaaattgaatgtgtcacacataacaagagtgaatactgtgctataaaattttaggttgaatgtgtgtctgtatggtaggtcatggtataaaatagactttttctttgctgtgggtggcaatcaggagagtttgaaagccccagcctaagatggtctctgcagcccctctggctctgagccttaaggatgtcatgatcgggccctggagtgcagctggatccctgcacaaagacccaccgcaccagtgcgcgtggcacagtgagagcccatgttatttgacagtccatctgcgtccactccactgttcttcaattggagaaaaggaaacaaaaattttagacattgttaaaaaaaaatagaaaagtagaccttttctgcttttattatttaatgtttaaagtattaataatagatgcctatgatttttaaaaagtaaaagtttttcctctccctcccaactgcagcctccaggtgtacaccctagaggcaagctctgccagtgctgaatccacaagccgtgctccccacaggggctcccagccaaggactgagaggccaagctgccctccctctcagagtctgtctgtccctctgcccctcacctggaccctgcagtctgacccctccttcccacactgtcccgcctgtcagcacagttctgcagtttcatttgaccaagttaaatctgactggtgcccagatctcactttctcaatatcatcctccagcaaaacaagtcagggttcttagagaaacaattgattccacggctgagacagggagaataccagatgagcctggagcatcttgtgccagaatgtaaggaagggatcaaagaaggatggggcatgtccaaggacataggagcacgtaggagccaactaaggagctcccagtatcgggtacagatcccaaatctggtacaatttgagtaaaaataattgcaatgaattataacccatagaataagagaaacatccaagagttcatacagatataaaaataatggaataaatacacatggaggaaagagttcttttttacagtagaattccaatcaataaatacagaaagagtgatatacaaagaaaatcaccatttgctaaaaactatggtaataactgttgcagccaggaatcatcaaccgatgctaaaatgagtaggcaaaaatatgatgagaaacaggatatttacatactcataaagcatctcccccacaggacatttattaattacaaagggaaaatagcaactttccagtggagaaacttcagagacaccactttaaccaagtgatccaagctaccatgaccagtaatgagacatattatcaccccgcccttgacagtgtcctgagaggcgcacagcatcacttctttggcatttgtgccaaaaatgcatatcctcaatctaatactgagaaaacatcagacaaatccaaagtgagaaatgtcctataaaatagctggccagtgtcacagcgacaaggaaagacgggggaactgccccacatgggaggagacaagtgccatgttggattctgaatgggatcctggactggaaacaggacatcagtgggacccagggggcaatggcagggagaggtgcgggacccagctgggacatctgctttcgggactctgctttcgtccccagcggcaatcaaagatgcacccctctgccaaccacagcagtctgtgattagatgtaatggaggcttcaggatcagaatgatccagcaacctggctctgtttctctctgatttccttaatcacatcctcttctggggctgtctttgttgtcaggctgcctccttcctgatagccaaatggttcttgaagtttcagttcccatatctgcttgccactctggaggagaatgagggctcttctggtagttctttccttaaagaacaggagcacgtttcttccccagaagtctccaaacttatcctcatatttcactgggctgaatttgattacaaacccattcctgaagtaaaccttgggccaggaaatgccatgcacaagttggcaaatgcaatgggatcactctctgaaaaatcagcttcccaacccccactcaggagctgcaggcaaggggctgagcatgggtcagctttccctgaagcatgtgtagacaggcagatacctgaacaaaactggggtgctaaaactggggtgctattaggaaggaaggggagaatggaagctgggtaggcaacagtgtccacaactccaagcagtgttctcttctgtaataattgcctttcctggtggagtttcctgtggaccaggaggatgcctgcagcaggcacggactttctgtttctcctgacggctgtatttcttactcccagtgagccaaagggcactttcttctttatacggcaggctctcaagagttgatttagaacaagccagatcaaatgtgggggcccagataatgtcaggtttctctgtcctggagagagggattcacagtggcaaccaccagctaggagatttttcaggtcccatgtcctagaggaggctcctccagggccttccaagccccaggattctgagaccaaataatgcccaaaggcctacataattaaacacgtacacccaacacataagcaatcttatttttgctgctttgtattgttctccagctacattagaatcttctccaggccagagtccaagtcccatcttaattactcttggtttttgttatatttccccagaaagaccttaaatgctctgggggatacggactgaagaggtgttgagaggtaactgcatacctctcacttctcaggaactgccagttccctgggcagaatcaggacctgggacagacctgcctgctgatgagatggccccacaccatctgcaggccagatttggtgctgtggacaatgtcggaggggacagtctacaggacagccaacggctttcaaaaattctgatatgatcaactggtgacactactcagaagactgtgttaagaattccgaattggggccgggcaaggtggctcatgcctgtaatcccagcactttgggaggccaaagcaggtggattgcttgagcctaggagttcgagaccagcctgggcaacatggagaaaccccatctctattaaaaatagaaaaattagctgggtatggtggtgtgtgccacttaggaggctgaggtgggaggatcacctgagcctgggattcagaggttgcagtgagctgagatcgcgccactgcacgccagcccacagagtgagacccttcctcaaaaaaaaaaaaaagaagaagaagaagaaagaaaagaatttgaattgggtactaggcatagtacctgggtgatgaaataatctgtaccacaaacccccatgatacaagtttacctatataacaaacctgcacatacaccgtgaacctaaaacaaaagtttaccaaaaaaaaaaaaaaaagaaagaaaagaaaagaaaaagaaaaaaaatttcaagacctagatcagaaatcagctccttggccaggcatactggctcatgcttgagcaaggcaggaggattgcttgagcccaggaatttgagaccagcctgggcaatactgtgtgacttcatctcaaaaaaaaaaaaaaaggaaaaaaaattatatataaaataaagcattctgaggcttcatccactcctcactcctcagagaagtactgaagctagctagagatttctgcagggtgtggaatggggagaaaggcagcgtgactgtgtgtcacatttgtttctgacacctttttgtaggtctgaaatgcttttaaataaacatttttaagtaatatatacgtgacaaaaattcaaacagcagcaaagtacagtgaaaagtcctccctcatccccagtgccctcccaccccaggtaatcacagttaccaggattcaatgcacatccaaacacaaacaaacacaaaccatggtgtgtttattgcccatggaggctctgtctcaggtccctgggaatcattgggagttgtggatcccagcactttgggaggctgaggcaggaggatcgcttgagcccaggagttttttgagaccagcttgaacaacatagtgagaccccatctctacaaaaaattaaaaaattagccaggtgtggcggtccatgccggtagtcccagctacttgggaggctgaggcaggatgatcacttgcacctgggacgttgaggcggcagtgagccgtgttcgcgccactgcactccagcctgggtgacactgcaagaccctgtctcaaaaaaagtagtcaaggaggctgagagccaggaagcctctggccagcaggtgagcaggccctttcctgctgctgtgcattgtatttaagagaaaagacagatacgtctgataccttcaaaggtgttcttcatacagcaggttgcaacctattaatagatcataaaatcagtttagtgtttcatcatcatcatcaaaaaccaccaccaacaacaaaaagacccagaacagatagtgtaaagagtgcatccctgcattcctgtatagggagaaatatggttttgtggaaccttgttgcgatgtaaagtgtacttcttaagataaatacagggttgaggtttttgaaataaagtttgaacaggaccaccttaagccacagtgtagactttccataggccaaaacctggatcaccaagacagtgtgccccaggctgcaggccacactcctgggagcctcaggcaaccttgtgcaggcctgacttcgagacactctgagcatgagctggttcctgggtagcctcccctctacctctccccgcttgccctccctccctccttctgctcctgtctctcctcatcccctccccgagttgctgcctcctcctcctcctcccccaccacctctccccgtctccgagttgcctgccccgccccctcctcttccccctgcccctctccgcgtccttcccgccttccccctcctcgtctcccccctccccgcccgcgccgtctgcgtccctcccgggcccagacgcggcgcggtcagggggcgctgactcacaggctgactcagctgcaggcgcgctgccaggcgacgcagcgggcgggtggccgggcgccggcgggctcgcagccgggctgctggcaacggtgccggcggaggtgggggcgtggcgcgggatgggcggcgcgggccctgccgtggtaccgcctggcagcgtccaccccgccgctggggcgccctggaggctcctggccctccgtggggccgtgacaccggcgctgcggggagcggtggcctcgcagaggctgggcatgggaggacggccgccccgggtaaaggacagggccctggaaacgcgggtctgccgggagcaggggacaggaaggagaccgcggctctcccagtcctgctgccccgggcctccagacggccagactctccccacaccggcctggagggggacgcgccgaccccagctgggaggggtggctggctgcgtagatccgtttgggccgcctgcctggaaaggcccaggtccgggcctcgtcctcctcttcacactctcccccgatctccaaccaccttcaccctcgcccccaccaccaccacccccagctcctcctggccgcctgcggtccagctgaggcccgcctcctccaggaagtcttcctggagagcctgtcctgggttaggcccgcccagagccacctggggcgacttatttcatggcaccttcgaccttgctctctgtctgttttgtgtctggcttcatcaccaaactgagcctcttgggggcagtgaccgggtcttaggtcttagttggcccttaggcgctagggctgagaagacttaggcggacaggagatgagactgtgtattcgacgacacactttagagatccagcccggaacacagccataccagattttaaaaaaagccaacataatatagcatgttaaaaattattgtaggccgggagcggtggcccacgcctgtaatcccagcaattcaggaggctgaggccggaggatcacttgagctcaggagtttgagaccagcctaggcaaccaacatagtgagactccgtctgtacaaaaatgaaaaaaaattagccgagcgtggtggcctgcacctatagtcccagctacctcgggaggctgaggagggaggaccctttgagccccaggaggtccaggctgcagtgagctgtgatggtgccactgtactccagcctgtaagacaaagggagagaccctgtctctaaaaaataaaaaataaatagtatacacatatggtgcttatttgaaatatacatattgtgtattttttaccttctatataaatgctattatttaaagaaaacaatatgattagttcacagtggcaattagtaataataggactaataacaaataatatgtgtgagaaaaatataaaaatagttttataatgtttcttcctgtcctgtgatttagcaatttattttaagtcattattagatacttaaattttgtatcaaaatacataaatgtaagacttttaaaatggtgaatgtaatataacagcagtatttaaacagatattactaatatttaatcaaaaataacaatgacgggctgggcgtggtggctcatgcctgtaatcctagcactttgggaggccgaagcgggccgatcacttgaggtcaggagtttgagaccagcctggccaacatggtgaaaccctgtctctactaaaaaaacaaaaattagtcgcccgtggtggcacccacctgtagtcccaggtactcagcaggctgaggcaagaggattgcttgaacctgggaggtagaggttgcagtgagccaagatcacgccaccgcactccagcctgggcaagagtgagactccgtctacaaaaaaaaagacattttggtcctatgatatagtaggatattttgactctttttatttccttgcctgcagcctttagtaggaagttcttccttgatgtagtgatgaaactgaatatagttaaatggaaaatcctttgacttgcagctctgctcttagagagccctcagtacactgactcctgaggtcagtccaatgtgatggcctcaagctgctatctcaacaaaagcgtttgagaatggaatacttaggattgtacctacaagcaacggcagggttttagatttgtagggattcgtttccagctgtccaaagatgtccattcactttgcatctgcaggctggttttggtaaaccagcagtttgtcatcttttgcatctatcatgtaggatatccatggctaagatatccatcctttttgaactttttttttttttttgagttggagtcttactctgtcgccctggctggagtacagtggcgtgatctcggctcactgcaacctcaactacccaggttcaagtgatcctccggcctcagcctcccaagtagctgggagtacaggcgcgtgccaccacgcctggctaatttttgtatttttagtagagacagggttcgccatgttggccaggttggtctcgaactcctgacctcagctgatccacccacctcggcctcccaaagtgctggaattataggcgtgagcaatggcacccggccctttttgaacatttctgagcacactggatgtcactgtaagttaaacctctctctgtctctctccttctctgtctgtgtttctctcaggaaaaatagttttaaagcacaaagatactttgaacttgtgaagttgaagttgaagttgaattccaaataagttacagttttagtaaagaagtgagaaagtcttgtttaaattggctgtccttttctggtgacattttggtttcgtttccaaaaaatgagtcatttttcattatatgagctttgtcagtacctacctataacatcgacaactcagggacagtcagttcatgcttttccagagcccttatgggctcctcaaagatcatcaggcagttttggaggaagaacttataaatttcagtttgactgtttaaccataatctttttctctattttcattcttaatatatttccaaattagacaaggacattcttcttgtcccatgctttgaaaatatggttgtatggcaggctgcctttttaccctggcaacagtgacagccctcgtgtaggcacatgtccaaaggaggccatctccttccatttctggaatgtgaaaaatctcattaagtgctttttcatgctttgaggaaactgaaaagtaaataaaagctttcattttgaaagcatcaatatcacagggaaggaaactccacccctttttactgatgtgtacaaaatgtgcaggacacttcgtggctaatatttttaacttttctttggtaaagcgttcatagactgcatggaatttgcaaaaatttacatttgcacggtctgccaaataggcagacagatgggcaaagtcatgtttgtatttggacaagatagcatcaacattctttttttttttctgcaggtggattaaaatcttcatagaaataaaaaggatgatttgaaactccattttttcaaatcaaagtatttacaagttaggagaactgtttttcattgccatgattggatgcagcacttggttactgtagaaagcatgattgttggtgggatctggcagaatccgctgcatgttgtaaagggtcaacacagctgccatcgacatttctccctttgttcacccacgtgatatttcagttacagcctgtaaatgaggaaatgtgcccctactcagtttcaaaaaacaatcaaaggagcagcacaatcacacaaattcatttttgtagtttgccctagctaattcagcagccactattttcaattggtgtcttttgtggagacaaaaagctttttggttaatgtggacatacttgcctatctcactgaggacttgtgaggcagtctctacagtcccttcttccaccatgcccaaccccgaattctctctgcttattgcgcagtatcccttgttttgattctttacctccctcatccagttgtctgtgtcactcctcctgtcgttaaaataacatggccatttgggtcacgcgggcattgatattgcaacaccatttcctcattttcatcacctgaatgcttaagaaaacatggcctcagtagtcaccatgctaaaattaaactagcagtgtctcaatacaaagcacaacaattaatccgcaggcaaagtggatggtcacgttcaagattatagcgcgcttaagttacatcacaaggagtgacataataatggatgatccactatggtgtactacaaatcatggtggttgtcctcagcaacagacactaaggaaggtgatgtgcccatttggcactaaaaccagtgttgccttcggcctctgtttctggggttgccatgtgggttttatacctttcccctaatctcctgtatcaatcactgaaaacctcgacttttctcttcccaagggagagtttacttccctttaactttttggcttcttctttaggacttttagtgttaaaaatggtacaatcccagacaaatgggatagttgatcatcttatcatgtttatagaatcaagaaataatgtctcaatttaaaaagtcaattgtatttataaacactagcaacaaacaattgtaagttcaaatttttaaaatgccacttacaataacatttttaaaacatgaaataagtagggataaatttaacaaaatatgttcaagacctatacctgaaaacaattaaacattggagagagaaattaacaaagagctgaataaatgtagagaaataccatgctaatagatgagaagactcaacattaagatgtcttttattcctaaattgttctatagattcaattcaatccaaatcaagatttcaccaggaattttttttttagaaattgagaaattggttctaaaatttatatagaagtagaaaggacctagaatagccaaaacaattttgaaaaataagaacaaagttggaggacttacactacttgatttcatgagttacttgaatcttgtaatagcaattaagacattataatgttggcataaaaatgaaagatagattaacagaacaaaatagagtccagaagtagatgtatgcatatacggtcaattgatttcaacaaagcaccaaagcaattcaatgggagaaaggatagtgtttgcaagaaatgggactgtgacaactagatctccatatattttaaagaatgattcttggcccctacctcacaccatataccaaaattaacgaattcaaaatgggtcagagatgtaaatgtaagagtgaaaaaccataaagcttctagaagaaaacataagagaaagcctttgtgaccttgaataaggcagtgttctttggtaggacacaaaagcacgaatcataaaagaaaatgttgataattggacttcatcaaaattacaaacatctgttcattaaaagacactgttaagtataaaagacaagtcacagactgagaggaaatttttgcaaaatacttagctgacaaagggcttgttactaggatacatacaaattctaaaaactcaatttaaaaaaccctcaaaaacaaagaaacaaacaaaaaacagcccaaagacttaaactggcacttcaccaaagaagatataaatagcaaattagcacaggaaaagatgctcaaaatcaccagagaagagggaaatgaaaattaaagctacaatgagataccactacacatctattaagaaggctaaaaattgaaaattaaaattaaaaaacaaccgacaacaccaaatgctggtgaggatgcagagcaacaggaacactcagacattgcttggtgggaatgcaaaatgccaccaccactctggaaaagtttgactttatttttttttcccaaaagtaaacacgtactcaccacatgactcagcaatcttattcctagatattacccaagagaaatgaaaacatatgcccacacaaggacctatacataaatgttctagcagcttaatttaatgatagccaagaactggcaaatggataacagattgtggcacatctatataatggagcccagtcagcaataaaaagaaataaagtactgatatagaattccacatgaataaatctcaaaagctttatgctgagtgaaagaaggtagtcttaaaaagctatgtactggttgggcacggtggctcacgcctataatcccagcactttgggaggctgaggtgggcggatcacttgcggtcaggaattcaagactagcctggccaacatggtgaaactaaaaaatacaaaaattaggcaggtgtggtggcgtgtgcctgtaattccagctactcaggaggctgaggcaggagaatcacttgaacccaggaggtggagattgcagcgagctgagatcacaccactgcactccagcctgggcaagagagcaagacaccaactcaaaaaaatatatatatgtgctgtaggattccctttatatgctattctagaaaatgcagattatagagatagaaatccaatcagtggttgccaagagttggggtggaacacagaatttctgagggtgatgaaaatgtgtatatcatgatgtggtggtggatgcactataacatacatttgtcaaaacaagcagaactgtacatttttaaagtgtgagtttccctgtgtgtaaattataccacaataacctgacaacaacaaaagagagagacgttggactgcatccatcccactccacttcttaccagggagctcccgggagcctctctagtgtctgtcctccctgccctgcctggggtgggctgagcagcacagcgtccctgcagagagaatggagaatgggcaatgcccacacaggggagtggcatggggtgagaaggaaccttagtcccgtcagccctgaccaccagcccatctctcatcactgttcagcagagtgagctcaagttgggtttctggcatctattggcagagccagggccaaaacgcaaggggtggggagtgttgtacaggttagggctgactgaatgatcagccctaatctgtacaacggatctgtgcagtctgagcttccacacagcagcagctgtccttgaccccttcccctcctagtcggcccctccctgaccttcccaggcctgtgggaagtcctgttaagtcccaggccatgtccactttgtataaaatacttaaaaataaggccaggcacagtggctcccgcctgtaatctcagcactttggcaggctgaggagggaggatcacttgaggtcaggagttctagagcaacacagcaagacctcctctctcctaaaaatttttaaaaatcagctgggcgtggtggcacgggcctgtgatcccagctactgaggtggctgaaacagaagaatcgcttgagcccaggagatctaggccgcagagagctgtgatcccgccactgcactccagcctgggtgacagagccagagagaccctgtttcaaaacttttttaattaaaaaattaataaaagatttaacgtgacccttataacagtcacctgagacggacgctgaccccattttacaaatgtggacattgagacacagggaagttaaatccccctgtcagaaaaaggctagcggaggtttaaggccgtgggaacgtgactccagagctgagggctttggaaccccgcctgctccggtagttgtggctggccttgccccacacacatttggttctagctcctttgcttgggtcttcatccatgcagcgaattccttagccacaggtgtccctctgctctctaactcacagcgagctcgctgcccaaagtcctgctccggcttcctgggtggacctgaccgcgttcgggtgcacgtggggcgactcacacctgacaagtaaagcgggtgaggccgcgcctgtgaagggcgcctggctcctccgcaggagcggtgcggcgcggcgcccccggctggaaccaggtgtaactgcagagaccctgggatcgcaggaacggctggcggcaggactgtccctacctcgagaaggtgacggggtttcctgcgctgccagccgatgaggcggccgtgacgcagcccgccgtgcagagtccccgtcggccgacaggcgtgcagagctctgcagaggacccttccgccctctgggcagcctgccaagccgtggcacccccaacccccagcactgggcacttgggagcattgcagccgccctggctcgtaccggtgccggtgctttgggcacctgggctggtttggacatgggtgccccgggcagagtccatttatgcaggtcagaatcagtgtgtggagcctgcatagacttgccctggagcggctgcctgtgctggggtggggaggagtagagggcgagaagttggtggggaagggaagcggcgccaaaagaatacccacaacatcttgcacctggaaggcaaagcagagggcagtgatctctgcagacttgcgggggcgacgcctgaagcaaacagggacatacaagctggtgccttctgtggttgtgcatggggtcttcatgcttcctgtctgagttcccagaagcttgtctctgcttttctaggcagctgccacagcctgtcacaaacagctcctggttctccacttctcatagtctcgatttcaaaatccattgcctcaccctccacctcctctccacctccacccctcctagcacctcctgactgcttgtgttctgtgtctccccactgtctcccaacctggggtggggttgggggggatgtctttcctcctgtctgctctttgatgtccagctgaagtgtcacctcctacaggcagcctcccctggctatgccagcttgtactgattgccctctcctctgaattctgtaagcatttcctatgtgtacctgcccctgggcaaggtgggcctgacttgttagagtgttagagttttaccctgttcctctaggagggcctggtaccaccacagcccagcatggtgtggtgcctcagcaggaggcatctggttacaatcaacacaagctgttccagccaatttaaagaaacttcaggaggaatagggttttaggagggcatggggaccctcctgcacccgaagccaggatgtgccaccaatcataaggaggcaggggcctccttccgctgctccctgggactctctaggtgtccgtggcctcagtccccctctgcacacctgcatcttccttctcatcagcttcctctgctttaagcgtaaacatggatgcccaggacctggcctcaatcttccgagtctggtacttatggtgtactgacagtgtgagaccctactcctctgatcaatcccctgggttggtgacttccctgtgcaatcaatggaagccagcgaggcagggtcacatgccccgtttagaggtgcagacttggagaaggaacgtgggcaagtcttcccaggaacaggtagggcagggaggaaaggggggcatctctggtgcagcccggttcggagcaggaagacgcttaataaatgctgatagactgcaggacacaggcaaaggtgctgagctggaccctttatttctgcccttctcccttctggcaccccggccaggaaattgctgcagcctttctggaatcccgttcatttttcttactggtccacaaaaggggccaaatggaagcagcaagacctgagttcaaattaaatctgccaactaccagctcagtgaatctgggcgagtaacacaaaacttgagtgtccttacctgaaaaatagaggttagagggatgctatgtgccattgtgtgtgtgtgttgggggtggggattgggggtgatttgtgagcaattggaggtgagggtggagcccagtgcccagcacctatgcactggggacccaaaaaggagcatcttctcatgattttatgtatcagaaattgggatggcatgtcattgggacagcgtcttttttcttgtatggtggcacataaatacatgtgtcttataattaatggtattttagatttgacgaaatatggaatattacctgttgtgctgatcttgggcaaactataatatctctgggcaaaaatgtccccatctgaaaaacagggacaacgttcctccctcagccagccactatggggctaaaatgagaccacatctgtcaagggttttgccctcacctccctccctgctggacggcatccttggtgggcagaggtgggcttcgggcagaacaagccgtgctgagctaggaccaggagtgctagtgccactgtttgtctatggagagggaggcctcagtgctgagggccaagcaaatatttgtggttatggattaactcgaactccaggctgtcatggcggcaggacggcgaacttgcagtatctccacgacccgcccctgtgagtccccctccaggcaggtctatgaggggtgtggagggagggctgcccccgggagaagagagctaggtggtgatgagggctgaatcctccagccagggtgctcaacaagcctgagcttggggtgaaaggacacaaggccctccacaggccaggcctggcagccacagtctcaggtccctttgccatgcgcctccctctttccaggccaagggtccccagggcccagggccattccaacagacagtttggagcccaggaccctccattctccccaccccacttccacctttgggggtgtcggatttgaacaaatctcagaagtggcctcagagggagtcggcaagaatggagagcagggtccggtagggtgtgcagagggccacgtggcctatccactggggagggttccttgatctctggccaccagggctatctctgtggccttttggagcacctggtggtttggggcaggggttgaatttccaggcctaaaaccacacaggcctggccttgagtcctggctctgcgagtaatgcatggatgtaaacatggagacccaggaccttgcctcagtcttccgagtctggtgcctgcagtgtactgatggtgtgagaccctactcctggaggatgggggacagaatctgatcgatcccctgggttggtgacttccctgtgcaatcaacggagaccagcaagggttggatttttaataaaccacttaactcctccgagtctcagtttccccctctatgaaatggggttgacagcattaataactacctcttgggtggttgtgagccttaactgaagtcataatatctcatgtttactgagcatgagctatgtgcaaagcctgttttgagagctttatgtggactaactcctttaattctcacaacaccctttaaggcacagatacaccacgttattccatccattttacaaatgaggaaactgaggcatggagcagttaagcatcttgcccaacattgccctccagtaagtgctggagctggaatttgcaccgtgcagtctggcttcatggcctgccctgtgaatcctgtaaaaattgtttgaaagacaccatgagtgtccaatcaacgttagctaatattctcagcccagtcatcagaccggcagaggcagccaccccactgtccccagggaggacacaaacatcctggcaccctctccactgcattctggagctgctttctaggcaggcagtgtgagctcagccccacgtagagcgggcagccgaggccttctgaggctatgtctctagcgaacaaggaccctcaatcccagcttccgccctgacggccagcacacagggacagccctttcattccgcttccacctgggggtgcaggcagagcagcagcgggggtaggcactgcccggagctcagaagtcctcctcagacaggtgccagtgcctccagaatgtggcagctcacaagcctcctgctgttcgtggccacctggggaatttccggcacaccagctcctcttggtaaggccaccccacccctaccccgggacccttgtggcctctacaaggccctggtgggcatctgcccaggccttcacagcttccaccatctctctgagccctgggtgaggtgaggggcagatgggaatggcaggaatcaactgacaagtcccaggtaggccagctgccagagtgccacacaggggctgccagggcaggcatgcgtgatggcagggagccccgcgatgacctcctaaagctccctcctccacacggggatggtcacagagtcccctgggccttccctctccacccactcactccctcaactgtgaagaccccaggcccaggctaccgtccacactatccagcacagcctcccctactcaaatgcacactggcctcatggctgccctgccccaacccctttcctggtctccacagccaacgggaggaggccatgattcttggggaggtccgcaggacacatgggcccctaaagccacaccaggctgttggtttcatttgtgcctttatagagctgtttatctgcttgggacctgcacctccaccctttcccaaggtgccctcagctcaggcataccctcctctaggatgccttttcccccatcccttcttgctcacacccccaacttgatctctccctcctaactgtgccctgcacccaagacagacacttcacagagcccaggagacacctggggacccttcctgggtgataggtctgtctatcctccaggtgtccctgcccaaggggagaagcatggggaatacttggttgggggaggagaggaagactggggggatgtgtcaagatggggctgcacgtggtgtactggcagaagagtgagaggatttaacttggcagcctttacagcagcagccagggcttgagtacttatctctgggccagggactgtattggatgttttacatgacggtctcatccccatgtttttggatgagtaaattgaaccttagaaaggtaaagacactggctcaaggtcacacagagatcggggtggggttcacagggaggcctgtccatctcagagcaaggcttcgtcctccaactgccatctgcttcctggggaggaaaagagcagaggacccctgcgccaagccatgacctagaattagaatgagtcttgagggggcggagacaagaccttcccaggctctcccagctctgcttcctcagaccccctcatggccccagcccctcttaggcccctccaccaaggtgagctccccctccctccaaaaccagactcagtgttctccagcagcgagcgtgcccaccaggtgctgcggatccgcaaacgtgccaactccttcctggaggagctccgtcacagcagcctggagcgggagtgcatagaggagatctgtgacttcgaggaggccaaggaaattttccaaaatgtggatgacacagtaaggccaccatgggtccagaggatgaggctcaggggcgagctggtaaccagcaggggcctcgaggagcaggtggggactcaatgctgaggccctcttaggagttgtgggggtggctgagtggagcgattaggatgctggccctatgatgtcggccaggcacatgtgactgcaagaaacagaattcaggaagaagctccaggaaagagtgtggggtgaccctaggtggggactcccaccagccacagtgtaggtggttcagtccaccctccagccactgctgagcaccactgcctccccgtcccacctcacaaagaggggacctaaagaccaccctgcttccacccatgcctctgctgatcagggtgtgtgtgtgaccgaaactcacttctgtccacataaaatcgctcactctgtgcctcacatcaaagggagaaaatctgattgttcagggggtcggaagacagggtctgtgtcctatttgtctaagggtcagagtcctttggagcccccagagtcctgtggacgtggccctaggtagtagggtgagcttggtaacggggctggcttcctgagacaaggctcagacccgctctgtccctggggatcgcttcagccactaggacctgaaaattgtgcacggcctgggcccccttccaaggcatccagggatgctttccagtggaggctttcagggcaggagaccctctggcctgcaccctctcttgccctcagcctccacctccttgactggacccccatctggacctccatccccaccacctctttccccagtggcctccctggcagacgccacagtgactttctgcaggcacatatctgatcacatcaagtccccaccgtgctcccacctcacccatggtctctcagccccagcaggccttggctggcctctctgatggagcaggcatcaggcacaggccgtgggtctcaacgtgggctgggtggtcctggaccagcagcagccgccgcagcagcaaccctggtacctggttaggaacgcagaccctctgcccccatcctcccaactctgaaaaacactggcttagggaaaggcgcgatgctcaggggtcccccaaagcccgcaggcagagggagtgatgggactggaaggaggccgagtgacttggtgagggattcgggtcccttgcatgccagaggctgctgtgggagcagacagtcgcgagagcagcactgcagctgcatggggagagggtgttgctccagggacgtgggatggaggctgggcgcgggcgggtggcgctggagggcgggggaggggcagggagcaccagctcctagcagccaacgaccatcgggcgtcgatccctgtttgtctggaagccctcccctcccctgcccgctcacccgctgccctgccccacccgggcgcgccccctccgcacaccggctgcaggagcctgacgctgcccgctctctccgcagctggccttctggtccaagcacgtcggtgagtgcgttctagatccccggctggactaccggcgcccgcgcccctcgggatctctggccgctgaccccctaccccgccttgtgtcgcagacggtgaccagtgcttggtcttgcccttggagcacccgtgcgccagcctgtgctgcgggcacggcacgtgcatcgacggcatcggcagcttcagctgcgactgccgcagcggctgggagggccgcttctgccagcgcggtgagggggagaggtggatgctggcgggcggcggggcggggctggggccgggttgggggcgcggcaccagcaccagctgcccgcgccctcccctgcccgcagaggtgagcttcctcaattgctcgctggacaacggcggctgcacgcattactgcctagaggaggtgggctggcggcgctgtagctgtgcgcctggctacaagctgggggacgacctcctgcagtgtcaccccgcaggtgagaagcccccaatacatcgcccaggaatcacgctgggtgcagggtgggcaggccccctgacggggcgcggcgcggggggctcaggagggtttctagggagggagcgaggaacagagttgagccttggggcagcggcagacgcgccccaacaccggggccactgttagcgcaatcagcccgggagctgggcgcgccctccgctttccctgcttcctttcttcctggcgtccccgccttcctccgggcgccccctgcgcacctggggccacctcctggagcgcaagcccagtggtggctccgctccccagtctgagcgtatctggggcgaggcgtgcagcgtcctcctccatgtagcctggctgcgtttttctctgacgttgtccggcgtgcatcgcatttccctctttacccccttgcttccttgaggagagaacagaatcccgattctgccttcttctatattttcctttttatgcattttaatcaaatttatatatgtatgaaactttaaaaatcagagttttacaacttttacatttcagcatgctgttccttggcatgggtccttttttcattcattttcattaaaaggtggacccttttaatgtggaaattcctatcttctgcctctagggacatttatcacttatttcttctacaatctcccctttacttcctctattttctctttctggacctcccattattcagacctctttcctctagttttattgtctcttctatttcccatctctttgactttgtgttttctttcagggaactttcttttttttctttttttttgagatggagtttcactcttgttgtcccaggctggagtgcaatgacgtgatctcagctcaccacaacctccgcctcctggattcaagcgattctcctgccgcagcctcccgagtagctgggattacaggcatgcgccaccacgcccagctaattttgtgtttttagtagagaaggggtttctccgtgttggtcaagctggtcttgaactcctgacctcaggtgatccacctgccttggcctcctaaagtgctgggattacaggcgtgagccaccgcgcccagcctctttcagggaactttctacaactttataattcaattcttctgcagaaaaaaatttttggccaggctcagtagctcagaccaataattccagcactttgagaggctgaggtgggaggattgcttgagcttgggagtttgagactagcctgggcaacacagtgagaccctgtctctatttttaaaaaaagtaaaaaaagatctaaaaatttaactttttattttgaaataattagatatttccaggaagctgcaaagaaatgcctggtgggcctgttggcctgtgggtttcctgcaaggccttgggaaggccctgtcattggcagaaccccagatcgtgagggctttccttttaggctgctttctaagaggactcctccaagctcttggaggatggaagacgctcacccatggtgttcggcccctcagagcagggtggggcaggggagctggtgcctgtgcaggctgtggacatttgcatgactccctgtggtcagctaagagcaccactccttcctgaagcggggcctgaagtccctagtcagagcctctggttcaccttctgcaggcagggagaggggagtcaagtcagtgaggagggctttcgcagtttctcttacaaactctcaacatgccctcccacctgcactgccttcctggaagccccacagcctcctatggttccgtggtccagtccttcagcttctgggcgcccccatcacgggctgagatttttgctttccagtctgccaagtcagttactgtgtccatccatctgctgtcagcttctggaattgttgctgttgtgccctttccattcttttgttatgatgcagctcccctgctgacgacgtcccattgctcttttaagtctagatatctggactgggcattcaaggcccattttgagcagagtcgggccgacctttcagccctcagttctccatggagtatgcgctctcttcttggcagggaggcctcacaaacatgccatgcctattgtaggagctctccaagaatgctcacctccttctccctgtaattcctttcctctgtgaggagctcagcagcatcccattatgagaccttactaatcccagggatcacccccaacagccctggggtacaatgagcttttaagaagtttaaccacctatgtaaggagacacaggcagtgggcgatgctgcctggcctgactcttgccattgggtggtactgtttgttgactgactgactgactgactggagggggtttgtaatttgtatctcagggattacccccaacagccctggggtacaatgagccttcaagaagtttaacaacctatgtaaggacacacagccagtgggtgatgctgcctggtctgactcttaccattcagtggcactgtttgttgactgactgactgactgactggctgactggagggggttcatagctaatattaatggagtggtctaagtatcattggttccttgaaccctgcactgtggcaaagtggcccacaggctggaggaggaccaagacaggagggcagtctcgggaggagtgcctggcaggcccctcaccacctctgcctacctcagtgaagttcccttgtgggaggccctggaagcggatggagaagaagcgcagtcacctgaaacgagacacagaagaccaagaagaccaagtagatccgcggctcattgatgggaagatgaccaggcggggagacagcccctggcaggtgggaggcgaggcagcaccggctgctcacgtgctgggtccgggatcactgagtccatcctggcagctatgctcagggtgcagaaaccgagagggaagcgctgccattgcgtttgggggatgatgaaggtgggggatgcttcagggaaagatggacgcaacctgaggggagaggagcagccagggtgggtgaggggaggggcatgggggcatggaggggtctgcaggagggagggttacagtttctaaaaagagctggaaagacactgctctgctggcgggattttaggcagaagccctgctgatgggagagggctaggagggagggccgggcctgagtacccctccagcctccacatgggaactgacacttactgggttcccctctctgccaggcatgggggagataggaaccaacaagtgggagtatttgccctggggactcagactctgcaagggtcaggaccccaaagacccggcagcccagtgggaccacagccaggacggcccttcaagataggggctgagggaggcccaaggggaacatccaggcagcctgggggccacaaagtcttcctggaagacacaaggcctggccaagcctctaaggatgagaggagctcgctgggcgatgttgggtgtggctgagggtgactgaaacagtatgaacagtgcaggaacagcatgggcaaaggcaggaagacaccctgggacaggctgacactgtaaaatgggcaaaaatagaaaacgccagaaagggcctaagcctatgcccatatgaccagggaacccaggaaagtgcatatgaaacccaggtgccctggactggaggctgtcaggaggcagccctgtgatgtcatcatcccaccccattccaggtggtcctgctggactcaaagaagaagctggcctgcggggcagtgctcatccacccctcctgggtgctgacagcggcccactgcatggatgagtccaagaagctccttgtcaggcttggtatgggctggagccaggcagaagggggctgccagaggcctgggtagggggaccaggcaggctgttcaggtttgggggaccccgctccccaggtgcttaagcaagaggcttcttgagctccacagaaggtgtttggggggaagaggcctatgtgcccccaccctgcccacccatgtacacccagtattttgcagtagggggttctctggtgccctcttcgaatctgggcacaggtacctgcacacacatgtttgtgaggggctacacagaccttcacctctccactcccactcatgaggagcaggctgtgtgggcctcagcacccttgggtgcagagaccagcaaggcctggcctcagggctgtgcctcccacagactgacagggatggagctgtacagagggagccctagcatctgccaaagccacaagctgcttccctagcaggctgggggcacctatgcattggccccgatctatggcaatttctggagggggggtctggctcaactctttatgccaaaaagaaggcaaagcatattgagaaaggccaaattcacatttcctacagcataatctatggccagtggccccccgtggggcttggcttagaattcccaggtgctcttcccagggaaccatcagtctggactgagaggaccttctctctcaggtgggacccggccctgtcctccctggcagtgccgtgttctgggggtcctcctctctgggtctcactgcccctggggtctctccagctacctttgctccacgttcctttgtggctctggtctgtgtctggggtttccaggggtctcgggcttccctgctgcccattccttctctggtctcacggctccgtgactcctgaaaaccaaccagcatcctacctctttgggattgacacctgttggccactccttctggcaggaaaagtcaccgttgatagggttccacggcatagacaggtggctccgcgccagtgcctgggacgtgtgggtgcacagtctccgggtgaaccttcttcaggccctctgcccaggcctgcaggggcacagcagtgggtgggcctcaggaaagtgccactggggagaggctccccgcagcccactctgactgtgccctctgccctgcaggagagtatgacctgcggcgctgggagaagtgggagctggacctggacatcaaggaggtcttcgtccaccccaactacagcaagagcaccaccgacaatgacatcgcactgctgcacctggcccagcccgccaccctctcgcagaccatagtgcccatctgcctcccggacagcggccttgcagagcgcgagctcaatcaggccggccaggagaccctcgtgacgggctggggctaccacagcagccgagagaaggaggccaagagaaaccgcaccttcgtcctcaacttcatcaagattcccgtggtcccgcacaatgagtgcagcgaggtcatgagcaacatggtgtctgagaacatgctgtgtgcgggcatcctcggggaccggcaggatgcctgcgagggcgacagtggggggcccatggtcgcctccttccacggcacctggttcctggtgggcctggtgagctggggtgagggctgtgggctccttcacaactacggcgtttacaccaaagtcagccgctacctcgactggatccatgggcacatcagagacaaggaagccccccagaagagctgggcaccttagcgaccctccctgcagggctgggcttttgcatggcaatggatgggacattaaagggacatgtaacaagcacaccggcctgctgttctgtccttccatccctcttttgggctcttctggagggaagtaacatttactgagcacctgttgtatgtcacatgccttatgaatagaatcttaactcctagagcaactctgtggggtggggaggagcagatccaagttttgcggggtctaaagctgtgtgtgttgagggggatactctgtttatgaaaaagaataaaaaacacaaccacgaagccactagagccttttccagggctttgggaagagcctgtgcaagccggggatgctgaaggtgaggcttgaccagctttccagctagcccagctatgaggtagacatgtttagctcatatcacagaggaggaaactgaggggtctgaaaggtttacatggtggagccaggattcaaatctaggtctgactccaaaacccaggtgcttttttctgttctccactgtcctggaggacagctgtttcgacggtgctcagtgtggaggccactattagttctgtagggaagcagccagagacccagaaagtgttggttcagcccagaatgagctcacagtgtcgcgggggaagctgtttaagaacaatgttacaccatcatgaacagcagtaagaaagaggctctggcttaacctggcctgataggcctaattgaatgagacagaaataagtcaaggatgctctgatttgaaatcatgaagtacctgatgaaaagaaatggtggtgagataaagctgagaaaattcatctaaagcccaaaattagtctagctctgtgtgtggcctcaggcaagtctttttctcctctctgagtgtgatggttaattttaggtgtcgatttgactggatgaagggatacccagatggctggcgaagcatgatttctgggtgtgtctgtgagatgttctggaggagatgggccactgagtcggtggactatgtggggaagatccgccctcagtgtgggcaggcaccatccaatcagctcgggacccagacagaataaaaaggcagaggacaggtgaattatctgtctctcctagagctgggacacccttctcctgcccttggacatcagttccaggttctcaggcctttggactctgagacttaacaccagtggccctccagattctccagccattagccctgtactgaggatcctgctatcagcttccctggttctgaggccttgagacctggactgagccaggccggcttcccgggctctccagctggcaggtctgccatgggactcctcagcctcaatgatcacagaagccaaatccttaataagccccttctcatctatctgtgtctatatatacatcctattagttctgtctctggagaaccctgactaatccaggggacatcagtaaaatgaagggattggatgagagcagtggttctacaccctggctgcacatttgcatctcccggacagccttttttttttttttttttttttttttttttgaggtggagtctcactttgtctcccaggctggagtgcaatggtgcgatctcagctcactgcaacctccgcctcccgggttcaagtgattctcctgcctcagcctcttgagtagctgggattacaggtgcgtgctagtagagatggggtttcaccatgttggccaggctggtctcgaactcctgacttcatgatcagtctgccttgcctcccaaaatcctgggattacaggtgtgagccaccgtgcccggccccagagagcttttaaaaacactgatgtggccgggcgcggtggctcaagcctgtaatcccagcactttgggaggctgaggtaggtggatcacgaggtcaggagaccaagaccatcctggctaacacggtgaaaccccgtctctactaaaaatacaaaaaattagctgggcgtggtggtgggcacctgtagtcccagctagttgggaggctgaggcaggagaatggcgtgaacctgggaggcggagcttgcagtgagccgagattgtgccactgcactccagcctgggtgacagagtgagactccgtctcaaaaataaataaataaataaaaataaaaataaaataaataaataaaaataaaaacactgatgtccagtcccacccccagagatgctaatttaactgattgtgccaggggagtggggacccagacattgatatttttacaactctccaattcatttcaatgtgttcactggggttgaaagcgactgggctaggccaggtgccatggctcatactggtaatcctggcgctttgggaagctgaggcaggaggattgcttgagcccaggagttcgaggccagcctgggcaacatagggagaacttgtctctatttaaaataataataaataaataaaaataaattaataaaaatggaccaaatggtctttaagggcctttcttctcaggtaaactctagttctaagactctccaggccaacgaggataaagccaattatctgagaaagcacagcacagctcagtccacagtaaaataaaggaggacttgatttgtggccacagctgcggccagaccagagaggacaccaggacccacggagttagttatctgtgtgtggccacaagaaaagagatctgcccgagctggggcctgtgggattctcctccttactgacctgggggaggaataggtggggctgcctggaaatgggagcaaaccgcgcccggggctggaagcacccgccgaatggcacagggccagtgcccaccacagtctcagtggaggtgacggactgaaagaatgacagaggactggaagtcttcgcctctgctgaagatttccgggtgggctgctgtcaggatggtgaccctgcatggcctagagcacctctggcatgacagtgttgggagatccaccgacctgctgcctggggaaaccggggaaaattagaaaagcaaacaaacatttcaagtcctggaaatggccctgagggcaaacaaaacaagaacaaaaatacaacttttaaaccaacagaagaaaacttgatgtgcccaacagaaagcaaaggagaggaatgaaaataagcgagaagcacgtataaatcaactgcatttctctacacgaacatgaacatgtggaaacccaggttaaaagcacaacagcacccctgtcactttaaggaaaaagtacttcgatatacatttagcaaaacatgtaccagatctgtgtgacaaaattcacaaaataccgggaatgtccattctcccaaaattgatctacagatgtcatgtaattcctatcaaaatcccagtatgtctttttgtggtcataaacaaggtactatatgtgtgtgtatgtgcgtaaaggacctcaaatgactagaatgttttggaaaaaagaattagagaaatcgctctacccagcgtcatggcttgttgaatagctacagtcatcagactacgtggtgctcatggaggaagagaaacacggatggagcgaaatggagactgtggagcgagacccacacagctacagccttttgatttttgacaaagataccaaagcaattcagtggaggaaggagaggcttttcaacaaagggtgctggcacagtggggcctcaataggcaaaaaagtgaacctcaacctatatctctcacctcatacaaaaattaactcagcatggaacttaggccgggcgcagtggctcacacccataatcccagcactttgggaagctgaggcgggtggatcccctgaggtcaggagtttcgagaccagcctggccaacatgaagaagccctgtctctactaaaaatacaaaaattagctgggcgtggtggcacatgcctgtaatcccagctacccaggaggctgaggcaggagaattgcttgaacccaggaggcggaggttgcagtgagccaagatggcgccattgcattctagcctgagtgacacagtgggactccatctcaaaaaagaaaaaaaaaaaagagaatggaacttagatgtaatgtaaaactatgaaacaaaacaaaagaaagtacagttgatggaaactgtgaaataagatggaaataataacaataaatgtaattaggttaagcttaccaatttaaaaagataaatctaagaattaaaaaaccaatgagacaatatattgattagagacaacttaaaaagcacccaaagactgaaaataaagaatgctagaaattccatgcaactttgaatgaaaagaaagctaagatagtgattccagtaacgaatacaatggaaattaagaaaaaaataccataaagaacaatgatggacattatatacagaaaaaatcactcacatgtaaagatctaattattataaaacaatatgtgcccctgcaacataacctccaaatactgcatacagtgtgacatttgacagaagggaaaggagaaataaacaacttttacttgtatttggagagttttttaaaaaattatcttataaaccaataaatcaaacagatttttaaaaagtggatatgtagatgatctgaacaataaaattaataagcttgagcgattctttttttgaattgagtctcgctctgtcacccagggtggactacagtggtgcgatcttggctcactgcaatctctgcctcccgggttcaagcaattctcctgtctcagcctcctgagcagctgggactacaggtgcccaccaccatgcctggctagttcttgtatttttattagagatggagtctcgtcatgttggtcaggctggtctcgaactccaacctcaggtaatccacccaccttggcctcccaaagtgctcggattacaggcgtgagccactgtgcccagccgagtgattctttttgagcacactaggaacatttacaaaactatactggaccatgaagaaagcctcaataaattccaagggatcaatataatacagagcatgtcctctagctaaaagacaataaaagtagaaatttctaatgaaaaactttaaaaatgccatatgtctgcaaactaattaacatatcagcaggcaatcataagataaactaagaaattgtaagaattatatgttaatttgtgtttcacagctacagcaacaccaggagggaaattatacctttaaatatacttatccaggctgggcgcggtgtctcatgcctgtaatcccagcactttgggagcccaagatgggtgggtcacctgaggtcaggagttcaagactagcctggccaacatggtgaaattccatctctactaaaaatacaaaaattagctgggcatggtggtgggcgcctataatcccagctacttgggaggctgaggcaggaggatcacttaaacccagggagtggaggttgtggcgagtcaagactgcaccattgcactccagcctgggcaacaagagcgaaactccatctcaaaataaataagtaaatattcttatccagaaacaaaaagttaaaagcaaatacatgttattcagggttctccagggaaatgaaattgaccgaatagagagagagatttatttcaaagaaacagctcacataatcgtgaaggctgataagtctaaaatctgcagcgtgggcctgcaggctggagacttagggaacactcacagtttgagtctgagtgcagtgtgctggcagaattccttctttcttgggtagagtcagcctttattaagaccttcaactgattggatgcagcccacctgcattatggaggataacctgctttactcaaagtccactggtttaagtgttaatctcatccaaaaaaacatctgcccagaaaacattcgaaatgatgtttgaccaaatatctggatactgaggcctagccaagatgacacataaaattaaccatcacgaagggtcacgggttgaattgtgtcctcccaaaattcacacactgaagccccaacctccaaaaactcggaatgtgacctcacttggaaatgggattgctgaggatataattagttaagacaaggtcaatacaaaagttagctgggtgtggtggtgggtgcctgtaatcccagctactcaggaggctgagacaggagaatcgcttgaacccaggagacggaggttgcagtgagctgagatcaagccactgcactccagcctgggcgacagggtgaggctctgtctaaaaaataaataaatacataaatacataaataaaaagacaaggtcattctggaatagggtggacccctaaaatgattggtgttctcataaaaaggagaaattggggcacagacatgaacggagagaagacaacgtgaacacacggggagaacaccacatgaagatgaaggcggaggtcagggccactcatctacaagccaagggctcccaagatggcccgcaacctccagaagctgggagagcagccttgaccagcttcacccttgcagccctcagaaggcagcaaccctgctgacacctcagtcttgaacttctagcgtccaaaactgtgaaacaatggatttctgttatttaggacatccagtctgtggtactttattataacagcccttgcaatctaatacagcaggtgacatgaaatccttacttaagaagctggaaaaacaccagatgcaggatcacgcctgtaatcacagcactttgggaggctgaggagggaggatcacttgagctcaggagttcaagaccagcctgggcaacaaagtgaccttctctctacaaaaaatcaaaaggttagccaggcacggcggcatatacctatggtcccagctactcaggacgctgaggcaggaggatctcttgagcccaggaggttgaggctgcagtgagctgtgagtgtgccattgtactccagctggggcaacagagtgagaccctgtttcaataattaaataaatacatacatacatacatacgaaactgggaagagagcaagtgacataaaaatcttacttaagaagctggaaagtaacacaaacccaaagaaacaagaaggagggaaatataaagataaggaggcagaattgagtgtaagagaggtgcaaatgatgaacacaagaaataacatcaaaagcagagaggcagatctatgaaaaatgcagattagaaagagtgacaggggcgtagcaatgattttactataagctaatacatttgaaagcctaggtgaaatacacacattcctgaacaaatataaaatactaacactggtgcaagaagaaaactgcactgccggtaaaagccattccactccccttcaaaagcttctgtctcatgctgctttgtgtgcgagttctgtcaaagttttaaagaacagttagttcccatcttaaacaagtttcctcccccgaatggaaaaataacaaaacccacccaactcattttatgatattttgtgccatgcagccaggctagaacttctgtacctcctggagggaagcacccacatcccttggctcctgagtgtggaaagctctgccctctggctctgtgaaagcggctgtctccagacagactcgggtgcaggcagctccttgcaaggtcggcagggagagcatgccccatctgcccctgtcttttgaaacatcctttttgccccatattgattgattgattgattaactgattgagacagagtcttactctgtcacccaggctggacggagtgcagtggcacaatctcagctcattgcaacctctgccttccttgttcaagcaattctcctgcctcagcctccccagtagctggggttacaggcacctgccacaaatctcagctaatttttgtatttttagtagagacacagtgtcaccatgttggctaggctggtcgtgaactcctgacctcacgtgatccgcccacctcagcctcctaaagtgctgggattacaggcatgagccaccacgcctggctccccatccttgatttgtacatgttttttgtttttgtagatttaggggtttgagtatagatttcttgcttgcatggattatgcagtgctggagtctgggcttctagtggagccatcgcccagtgagccctgtacccaaataggtgattttcaaccctcaccccttcccttccacctttcgcagtctcccacgtctaggattccactctgtatgtccatgacaacacccagctttagagtgcacggctgagggcacagtcgaggaggagacaccctcccccagggggcacatgctgggccttctggaggcagatgagggagagtctcttgggaggctgcaggcctggcgtgcgtgggggtgtgtcacgaaggaggtgagcagtgtaggggacaggctgggttaagcttatccattgaccatatctatcgagtgccacctctgggcccagagctgagcccagacaggcgcatgggtcagacaaggcccagggacacacaaattgtagaagagaagctttacacaagcttgctttaacagagccttttcattgacaaaaataaaaggacgtgaaaagaaatttaagactcaatgggctgaagagtgatctcttattaccgcaacatttgagagctgatgtcagatggcagcctggctgcagagaaggtacccaggccctgggctcagtggcccttccccagctggtgcccccagccttactgcctggccctcctgcaccttcttttccttgtctaggaactgggctcatccccctctatccccagtggttgtggggatgaaaggaaggccaacccctgcaaggcctggtgcctggagctggccctgggtagacgcctccctccccttcttcctgagcccttcatgcagagcccaggacgcaatggtcacaatggctaaaatctctttggaggagggagagatcagtgcaggctgaagccattggtgagagtggaagaattcagctctccagcggaaggcagcaatatgcagagagccctgtgatggggctgctggagccgaggcctgggggttcagtcccctgagaagcccccaccagcttagcctgggggacgagttatgggaaggacagatgagaaactgctaactaaacaaggccaaaaggaccagggcaagctgggggagaccatggaggctgtggaaggaacaggctgactaagcctcaggagaggccaagagaggctaagcagggagccaggtcctaggaaagaaacagcacccagctctggggccatgccggggaggctgtgggtagagggctagggcaccaggccatattgagaaccttcattgcaggcccatgccaggcacgtgacccacagtgacccggggcttcacagagcaaccaagggaggaactgccgactccattctgatgaagggaaaagagcctctggggggctccctacatcactgctattggaggagtctgggtaggaatgcagcaggctccaaagtccctgctgtgtcccgtgggccatggagccaggtggcgggtcagggagaggagtggtgcatggttgggcagtggcaggacctaggctctgtcaatatttggtgtgggtcaatcattagccagcctcagacttgtccccccacaggttcctcaggtgggttctgggctaggccctgccctgctgggggctccacagggcttggcctagattggacgagtcgggtgggcagcccctggtctctccactcaggagactccccacccacagggctgcagtcctgcctcagggctcagcaagcaaacacgtaagagcactgcacagttgaaaaaatgagttttaaaacaatctgccaagaaaaaagatgtcaaagtagtcatcacgggaaaagtcagaattttggtggacttcactgcacttattctgtggctattaattttaaattatgtatgtgggggaggggagcacaccataatctttctagtgccctgaggctcttaaaccaggctctgttcacctggacctgtgttcatgggcaggaaactgttctaggccctttatatgcattgtttgatttaatcctgtaagtgattttttttttttttttgagacagagtctcactctgtcacccatgctatagtgcagtggtgtgatctcagctcactgcaacctctgcctccccggttcaagtgattctcacgcctcagcctcctgagtagctgggaccacaggcgtgcaccatcatggccggctaatttttgtatttttagtagagatggtatttcgtcatgttggccaggctggtctctaactcctggcctcaagtgatctgcctgctttggcctcccagagggctgggattaccggtgtgagcaaccatgctggaccctctaagtgatcttaagagatgcctgctcttgccttcccatgttagccccctaatgtaaccggctcagagatggacacagcgaatacagacagaatggggatgtgcctccaaatctgcctgactccaggaggggtccctttagttgacattggccctggagagacctcagtggagtggggaactgggcaggagtctagcggggctgaggtgggaggcaggcttcctgccagttctggcagagggtggggctgagtggggtgggccatgggccagcagggtcctcatggctggctgcagatggagttctaggtctattatcagggtggtggacgagggagggacaacagctctctgggatcaggtgtgtgtgctataacatgggctccaggccacctggctacagagaagctatgctgtttggggggcgtcacctcaccccacaattggcctcacattcatcaattgtccctcatttgggcaagaaaacccaggtcacacacaacttggtgggagagctaggcctaaaaccaggtcccctggcttggtgtccagtgttctttcctgtgcacctgtcccgccaccctggacagtaagtgtgagggccacagtgtggactctgaggccccaggagccttcagcaggccacagcacacacacatgccaaaaacaagttatacatgcatgtggtaaaaaactcaaataggacagaggacttcatatgagtggttgtacttggctatcccatccctccttacccttactctttttgctctctgtatgctataatttgagtactttctattatctttcttcatcaattctgtcttctcatgtgtccaaaccctgtgaaacttggccaatcagttaataatttcagatgataaacccttcaattctagaatgcccacttgattcctctctacagattccatttctctgtaaaaattctccatcttttcacctattttccccatttttcttctatcttctttaatatattgctatagttgttaccttatccaacatttggatcatctgtgggtctatgtctattggctttttttcttttgactattggttctattttcctttttatttgcctgtcttgtaatttccacagtatgcagaagacaatttataaaggaaccatagcaaccaaatattatattattttcttgtcaggaaagtctgccctttcaggtttaattaacaacaaaactgggatgaagctgggctgcagttttagttataatcagtccatatcaggtttcaaatgcttgatgggacagcctgagtgcctggtaagtctgtcttgtcaatcccaaagatgtaggagagtcattcttccctttggcagttttaaactctgctccttagtttcctatcccctgctgcttccaaatttcacaaatgtcttgagaaggagactggcagtttgttcaagactgtcccccttcctggggaggactttgcttaccaattatccaagactaaaggagattaggctctagtttaaaaactccctagtatcttgtgaagcttccagatgcagcgaatcagcaaatgaactgggggacggagggcagcatggttgtcacgctttaaaaaaattaacagattttaggtcgggcatggtggctcatgccttaagtaatcccagcactttgggaggctgaggcgggtgaatcacttgaggtcaggagttcaagaccagcctggccaatatggtgaaaccccgtctctactaaaaatacaaaaattagctgggtgtggtggcatactcctgtaataccagctacttgggaggctgaggcaggagactcacttgaacccaggaggtggaggttgcagtgagccaagattgcaccactgcactccagcctgggcaaaagagcgagactccatctcaaaaaacaacaacaaaaatcaacatattaacatattttatttttcagagcagttttaagtttatagaaaagtgaataggtggctggacgcggtggctcacacctgtaatcccagcactttgggaggccgaggtgggtgaatcacgaggtcaggagttccaagaccagcctggccaacatggtgaaacccccgtctctactaaaaatacaaaaaattagctgggcttagtggggggtgcctgtaatcccagctactcggaaggctgaggcagaagaatcacttgaacccagaggtggaggttgcagtgagccgagtttgcaccactacactccagcctgggcgacagaatgagaattcatctcaagaaaaaaaagaaaagaaagaaaaagcgaatagaaggtacagagagttcccatatgccttcctaaccccaatagagtttctcctattattaacatgttgtattagtgtggtacatttgttataagtgatgagtcagtattgatatattattaactaaagtccacggtttacatcagagctcactctgtgttgtccattgtataggtcttgacaaacatatgacatgtatccaccatcacagcatcataaagaataatttcactgccctaaaaatatcttattctctccacctatttatccctcccttccttcctgcctccacccaatccctgatcttttttttttcgagacagagtctcactgtgtcacccaggctggagtacagtggcacgatctcgactcactgcaacctctgcttcccgggttcaagcaattctctgcctcggcctcccgaatagctgggattacaggtgcccaccaccacacccagcatttttgtatttttagtagagatggggtttcaccattttggccaggctgctcttgaactcctgaccttgtgatccaccgtctcggcctcccaaactgctgggattataggcgtgagccatcgcgcccggcctgatctttttactgtctccatagttttgccttttccagaatgtcatgtagttggaatcacacaataggtagccttttcagattggcttctttcacttggcaatgagcatttaagattctttcatgtcttttagtggcttgatagctcaattctttttattgctgaataaaattccattgttttgatgtaccccagtttatttattcaactactgaaggacatcttagttgctcccaacttgtggcaatatgaataaagctgctctaaatatctgtgtgggtgcaggttcttctattaacacaagttttcaactcatttggatacaaaccaaggagtatgattgctacattttatggtaaaagcatgtgtagttcttttgtttttgtaaagatgggattttgctatgctccccaggagggtcttgaactcctagctcaagtgatcctcctgcctcagcctcccaaagcactgggattgaaggtgtgagccaccacacctggcctatgtttacttttgtaagaaactgccttccaaagtggctgtgttctattttgcattcccaccagcaatgaatgagagatcctgttgctccccacccttgccaaatttgatgtggttggtattttagatttttgtcattctaataggtgttagtggcatctcattgttttaatttgtaatttcttagtgacatctgatgttggatatcttttcataagtatatttgccatctgtatatcttctttgatgagatgtctgttcagatcttttgcctcttttacattttggattgtatgttttcttactgttgagttgtaagattttgtgtgtgtatctatatgttttggacacccatccaaatatataggtattttgcaaagattttctcccagtctatggcatgtcttttcattttccaaactatctttcgcggagcatgtgtttttaattttaatgaagtccggcttatcaatattttcttccatagattgtgcctttggtgttgtatctaaaaagtcattgccaaacccaaggtcatctagattttctcctacattttctagaagttatagttttgcatttttcatttaggtctatgatccattttgagttaatttttgtacaggtgtaaggtctgtgtacggattttttttttttttttttttgagacaaggtctggctgtgtcccccaggctagagtggaggggtgtgctctcagcttactgcaacctctgcgctcaagccatcctcctacctcagcctcccaaatagctgggactacaggcgcatagcaccatgcccagctaagttttgtattttttgtagagacggggttttgacatgttgcccaggctgctctcgaactcgtgaactcaagcaatccgccctccttggcctcctgaagtgctgggattacaggtgtgagccaccacacccagcatggattcatttttgcatgtggatatccagcggttctagcaccatttgttgaaaagactatcctttctccattgaattgctttcgctcctttggcaaagatcagcaaactttatttgtgtaggtctatttctgggctctcttttctgttccattgatctatttgtcaattctttcaccaataccacactgttttaattactgtagctttatagaaaggcttgacgtcagtatcagttcttcaatttgttcttttccttcaatattgtgttggctatcctggcacctttgccttttcatataaactttagaactgctgggcgcagtggctcacgcctgtagtcccagcactttgggaggctgaaatgggatgatcacttgaggccaggagttcgagaccagcatggccaacacagcaaaactcgtctctactaaaaatacaaaaacttagccaggtgtggtggtgcgcacctgtaattccagctactcaggaggctgaggcaagagaatcgcttgaacctggaaggcagaagttgcagtgagctgagattgcactactgcactccagcccgagtgactttataaataagactctgtctcaaaaaataaaaaataaactttagaatcggttttccaatatctataaaataacttgctgggattttgactgggattacattgaatcgatcaaattgcagaagagacatcttgacaacactgagtcaagatctctgtgatgggatggatatctctccatttatttagatctttgatttctttcatcaaagtgttgtagttctcctcatatagaacttttacttattttgttcaatatatacctaagtatttcatttttgggggtgctaatgtaatggtattgtgtttttattttatttttttctttttgagatggagttttgctcttgttgcccaggctggagtgcaatggcacaatctcagctcaccgcaatctctgcctcctgggtttgagcaattctcctgcctcagccttctgagtagctgggattatgggcatgtgccaccacacccgcctagttttgtatttttagtagagatggggtttcgccatgttggtcaggctggtcttgaactcccaacctcaggtgatctgcccgcctcagcctcccaaagtgctgggattacaggtgtaagccactgtgcctggcctatgttttatttcaaatttgacttgtttattgttggtatagaagaaacaattgacttttgcatattaaccttgtgattaatatgcaaccttgctataatcacttattcatttcaactaaatgaaaatgaaaattgcaatgctgaattgcaagctggctataatcacttattcattccaggaggtttttgtttttaattcttcaggattttctacatagacaatcacattatctgtgaacaaaaacagttttagctcttccttctcaatctgtatgcctttcatttccttttcttgtcttattgcattaactaggacttccagtgcaattctgaatggtggttctgagaaaggacatcctttaccttgttactgatcttggtgggaaaacatctagtttctcacaattaagtacgatgttaactgtagggtttttgtagatgttctttattcaaattgaagaagtctattcctagttctctgagagtttctgttataaatgggtgttggattttgtcaaatgcttcttctgcatttattgatatgatcatgtgggttttcttctttagcctgttgatataatggattacattaactgattttcaaatgttgaaccagacttgcctatctggaatcaatcctatttggccatggtatataattccccttatgcattatgcactgttggatttgattcacatatatatgtgtgtgtgtgtgtgtgtgtgtgtgtgtgtgtgtgtgtatgtgtgtatacataaatatatatataaatatatatttatatatatacacacatacacacacacacacacacacacacacacatatattttttgagatggagtctctctctgtcgcccaggctggagtgcagtggtgcgatctcagttcactgcatcctccacctcccaagttcaagcaattctcctgcctcagcctcccaagtagctaggattataggtgcacaccacaacacccagattttgtgtgtgtgtgtgtgtgtgtatttttagtagagacagcatttcaccatgttggccaggctggtctcaaactcctgacctcaaacgatccgcctgccttggcctccgaaactgctgggatgacaggcgtgaaccacagcacccagcttgattcactaatattttattgatgatttttgcatctatgttcatgagacatatcagtctgcagtttcccattcttgtaatgtctttgtctgcttttggtattaggctaatgctatctttataaaatgagttcagaagtattccttctgcttcttttttctggaagaagtgtttgttgttgttgttgtttttggtttttgagacagagtctcactctgtcacccaggctggagtgcaatggtgcgatctcagctcgctgtaacctctgcctcccgggttcaagtgattctcctgcctcagcctcccaagtagctgggattacaggtacctgccaccacacctggctagtttttggttggttttttgttgttgttgttgttgtttgtttttgtttttttgagacggagtcttgctctgtggcccaggctggagtgcagtggtgcgatctcagctcactgcaagctccacctcccaggttcatgccattcccccgcctcggcctcccgagtagctaggactacaggcgcctgccaccacgcccggctaatgtatttttagtagagacggggtttcaccatgttagccaggatggaatcagtagtgatgatttctttttcacttctgatattagtgatttgggtcttctctttttttttcttagttaacctggatagagttttaacccttttgtgaatctttttaagaactagcttttggttttgttgatttttctctattgatttcctgttttcaatttcagtgatttctcctctaatttttattatctttttttcttccctacttcgggtttactttgctcttctttatctagtttgctaaagtggaagcttagattgctgattttagatatttctcattttctaatatatgtattcagtgatctaaatttccctctaacactgcttttggtgcatcccacaaattttgataagttgtattttcattttaattgaaaatattttaaaatttatctggaaacttcttctttgtcccaacatgtcataagtgtgttgcctaatctccaaatattttggggttttctagctatctgttattgatttatagcttaattccattgtggtctgagatcatactttgtataatttccgttcttttagatttattaaggtgcgtttcatggctgagaatgtggtctatcctggtgaatgaatgctccaagtgagcttgagaatgtgtattctgctgtcattggatgaagtattctatagatgtccattagatccagttgattgatgatgctgttgagttcaactatgtctttgctagttttctgccagctggatctgttaaatagaggggtactgaagtctccaacataaaaatgagtttgtttatttctccctgcagttctatcagttcttgcctcatcttgggacactgtgttgctaggtgcacacactttaaacactgttatatcatctttgacaactgacccctttatggctatgcaatgcccctcttcatccctgataacattccttgctctgaggaagtctactttgcctgaaattaacacagccactccagctgtcttttgattagtgttaacatagtatactgtatctccatccctttacttttaatctatttctttatatttaaagtatatttcttccatttctattcattgcccttgatttgttttgttctttctagccttttcaggttgtgtgtgtgtgtgtgtgttgtgtgtgttttgctttctctggttttaatcgagcattttatattattccctttttactcctctcttatcatacaaattatacttgtggggttttttaatgtgtgtggtttcccgtgactttgcagtaaatatttacaactaattcaagtcttctttcataaaacactttaccacttcatgggtagtgcaaataccttatgaaaaagtattctcaattcctctcttccatctttataacactgctgtcattcatttatccataagctgtaatcactattaactgaaaaaactttacctattagttaaaaatgagaaagctaaatttttattttaccttcatttatttcttctctaacactcttcctttctttatgtagatctgagtttctgacctacataatttccctttccttctgaagaatttaacacttcttgcgaggcaggtctactggtgacaaattctctcaatttttgattgtctgataaagtctttacttctccttcacttaaaaaaaaaaacaaaaaaacctttattgtatttccagtatctccttcacctttgaaggataacatttggtgaatacagaattctaggttgatgggttttttttctttcaacgctttaaatcccataaaccactctcttcttgggtgcagtttctgatgtgaagcatgatataatgcttaccattgttcttctacagataagatgtttttcccctctggcttctttctatattcttcccatgtctttgatttttgcagtttgaatagatattcttaggtgtagattttttggggtattcatcctgtttggtgttctctgggcttcctacacctgtggtttggtgtctgccattaattttggaaagttctgttattacttcaagtatttcttctgtttctttcttctctgtgtggtattcccattatgtgtacactatccttttatacctttggtatttgtcccacagttcttgaatattctatcccatcatttccattacttcttcctctctgcatttcaattttgggagtttctattgacattccttgaagctcactgattcattccttggccatgtcccatctattcatgactccactaaaagcattcttcacttcagttacagtgtttatttttatttctagcattttgttttgcttttttccttttttctttttatagagacaaggtctcactatgttgcccagcctggtctcgaactcctgggctcaagcgatcctcctcagcctcccaaagtgctgggattacaggtgtgagccaccgcatctggccattgcacctgattctttcttaggcatttccatctttctacttacattactcctctgttcttgcatgttagccacttttcttatttgagtccttagcatattaatcaattatttaaaattttctgtctgataattcaagcatctctgccatatctgtcttattctgatgtttgttctgtctattcaaagtgtatttgtctcttataaaacatgatgtgttgggcaaaagaaactgaggtaaacaagccttttgtgaggctttctgtactttacttctccttcacttaaaaaaaaaacaacaaaccttgattgtatttccagtatctccttcacttttgaaggataatttggtgaatacagaattctatctggctaggagttgggctgtgtttaccgtttgctctagctgtaggtgtcagaggataacatttactttggtgttcttgtctgtggcttccctgttgtctttgggtttccctagagtcttcttcataaatcaggtctgagatgtgcagttcagttgtattctcgttattacaggagccctgttgatgtgttagtgaggggtggagggacgaagcattctataggtctcagtcttttaatgaacctctgcaggggctgtgaccaacacaagggcttctcatttgtctttccccgctggaggtgggcaggaagcctagaggagggtagagttgggtatttctcttcccacatgtcaggctccggtaaaacagtttcccctgaggacagaccttgttaagaagagaatgctctgggttaccttttcttttcctctaccagaagcagcagggaatttttctctgatctttactgtgacaacttggtaaagcaaaacaaaacaaaaaactgtgtggggccctgtaagactggctcccctggtatttttaactctctcatggagtgcccagcaaatcatcaattaagttttaagtttccctaccccggtactggttcctgtggagttttctactcctaggcctctgctcccgtaagttctggttctctgtatgtgcttctctgtctctccattttgaggacagcagtttgccctgtggcctcagatctctggtggatcaagaaaagttgttgattttcagtctgttcagcgtttttcttgttgtgaggttgggggtgatgactgctaagctcctcacatgccaactgaaaatgaacagtgtcttttgaagaatgacagtttttaattttgaaatagtccaatttattttttcctttatagggttttttgtgtcatattttaaaacccctgacaaattcaaagtcacgaagattttctcctagaagtgttacggttttagctcttacatttaggtctgtgatccatttatttctttgtgtgtggtgtgagctaaggtcagaggtttaattttttatatatccagttgtaaagatttcttgtgactatcatcctttcctcattgaattgccttggcatctctagcaaaagtcatatgtacatgagtcttacctggacacctatctgctccattgataatccgctccattgatttctttgtctctatgccaacatcacattgttttcactgctgaagctttataaatctttaaataatgtaattcatgcagcttttaaacttatttttcaaagttatcttggctagtctagagttttttgcatttacatatacattttagaatcagcttatcaaattttacaaaaaagcctgctagtactttgcttggtattacagtaaatttgtagatcaatttgggagaactgatatcttagcaatattgagtcttctgaaacatgaacatagcatacctctctatttatttaggtctttaatttctcacagtaactgtatctttcaatgcagaggacttacacatcttttgccaaagttattcataaacatttcaaaattttgatgcattttatatatttaaatttttttcttcagcctgtctccttgctgagatgctattttttaaacatttaatttccaattgcttgttgctagttcacagacatatgactgaattttgctattgacattgtatcctgcaactatgctaaactaacttattagttctaagaattcttctgcaggttccatattttctacataatcatgttgtttgtgaataaagactggtttattcctcatttccaaaccatatgacttccttaaacgtttagaattctctagtagagacatcttggtttgtagttttctttgtgggaaggtttttagctacaaattcagtttctaaaaatacatataggcatattcaggctatttcttcttgagttagctttagtagtttgtgttttataaggaatttgtttaggttgtcaaatttactggcataaagtttttcataatattttttgtccaatatatacagaatagtgatattccttctcttattcctgatcttttgttttgagacagagtctcgctctgtcgccaggctggagtgcagtggtgcaacctcggctcactgcaacctccgcctccagggttcaagtgattctcctgcctcagcctcttgagtagctgggactacaggcgcccgccaccacatccaactaatttttgtatttttagtagagacggggtttcaccacactggccaggatgatctccatctcttgacctcgtgatccacccgcctcggcctcccaaagtgttggtattacaggcacatgccaccacgcctggctaatttttgcatttttattagagacggggtttcaccatgttggccaggaggtctcgatctcttgacctcgtgatccgcctgcctcggcctcccaaagtgctgggattacaggcatgagccactgcgcccggcctcctgatattgttaatttgtgtcctctgtttcctgatcaggcagtgctgtattaatgagtcagatagcttctctgtgttgcccctctattgtttacttcttcagggcagatttcaaaaatccacaggcaccaaactcaaagtttgacacatccaatagcttcaaacgtagcccatataaactaatttttagccatttagagcctgtctgctttgcatgccccatgaaactgcacccaacatctgctagccacagacaaaataaacctggtagtacaagattccaagccgcagctgcccttcagaaattggatccagatacatggtgctgctcagtcacgtcatctgacacataagcccctccctggcagtcccctcctccttgagtcccctaccctccggtacttctgagtggctatcctggggctgtaacctctggatggcctcgtccctcatgggacttcccttacatgccaccctgtcaaagtgttgccaaataaagctcatcgtttgctattgctaagtaatggtcagatctttttttcttggtcagtcctgaaatccccctgttgtttctgagacagagtctcactctgtcacccaggctggagtaccgtgacatgatctcagctcgctgcaacctctgcttcctgggttcaagcgattctcctgcctcagcctcctgagtagctgggattacaggcgtgcaccaccatgcctggctaatttttgtatttttggtagagacggggtttcaccatgttggccagggtggtcttgaactcctgacctcaagtgatcctcctgcctcggcctcccaaagtgctctgattacaggcatgagccactgtgcccagccagtcccaaaatcccttgaactcgctacaaggggtggtgaagaaaggggagggttttggaaatggttaagaaattgatatgggggccgcccagccagtaggacaatcaattggcaaaagaatcctggacagtcccaagtggttggaactcagaatttggaagctttccactcagtttgtatagcactgctgtgtgctctatggcactctatatttgtttggtttcccccagacactcattagcttgggcaagtggtagcaccagtatttgaatgaacccacacactggaactgatctttggggcgggaggtttggggttgcccaggagggaggtcagtccacccgcctgagtcctccactaggcagttgctggacattataagacatttgggcttgaatagtaaaaggggaggatggcatgtacctgcactgagagcagactacccctgactccctaacagtgtcctgttggtttagggaactcttagagaagaggatgccctcatccctggagactgtgatagcaggtgaatgaactgacaaggcagagacatcaggccaaggctggtctcctaagcacagctggagcgatacctctgctgctgggacctgctgtgcccaacccttgtgctaagccagctaaagcattacttaaagtgactaaagacaaggaaggtcatatccctgaccctcgcaggactctgaagatggtggctgtcctactgaacaggtgctccaaaccacgaaacacgggtcaagctctattgcttcttaccaggatgccgctggacaggaggcaggggcttgaactcccaggaaggaagagcctgagggtaggaccctgtggaagaggactggtgtcctctagaggaaaggcagagtgacagcaccatgacagtgataagtggcaatcaatccaccatctgctttgccggtgaccacagcaaagtaataacaactgagaagacaaaaagggaggaccaagaaggaggggacaactcttgcctggaggagaaaacatcttctctctcgccctgtggccctgtttctcctaacccaggaaccaaagacaaaggggctggctggctgtctagagtgttctggcggggagggagctccacctaaagggctgaaactcaatggctggctgccccagtatggaatggaaaaatggtgtccctgcaaaagcatcctgcacaattagtgaggaaggtgggaatgacccccagcgaaggctttggaccctggcccacagataccttgttgatggggatttttaaggcttggaaggctgctgaccctatgttagcatagggtcttaagggtttgggcagactgtcaatggaaaatgttagctgaggccaaaggtcttggtcagctggggatgtagaagtgggcttatcagacgacaggctgaatgcaacacaatggtgtggcaagccctgagcagcttaagggagtcctgactccatctgcttgtttcttaggagagcttccgacaaagtcctcttcaggggcaatgatactaatactaagacaattcaaggggccatagctgcctggacttactggaaacttagaaaagacaaactcagagtgctgcccatgaattctacaaacaacaccctacctggcctaaatccaaattactatgaacagtaagacttcccctctcctaagccagacaagcttcctacagccaggcatctccttaaatgtgaaccctgcaatgaacaagaaaggttactttggatcctaaggaggggggcgctcaagattggatgatctctagtaaattggtttaacagttccaataattactagggttagacgacaattctcagcaggtgtctcctctggaaacagcccctccttcatatctggccgtgtcccccatacggatccagtggtccatgttcatggaaaacagacccttctggtagacaatcgcccttttacctttctccacgttaatagtaatctgggcagggcgcagtggctcatgcctgtaatcccagccctttgggaggcagaagtaggtggatcactggaggtcaggagttcgacaccagcctggccaacatggtgaatccccatctctactaaaaatacaaaaattagctgggtgtggtggcaggcacctgtcgtcccagctactcaggaggctgaggcaggagaattgcttgaacccaagagcggaggttgcagtgagccgagatcacgccatcgcactccagcctgaatgacaagagcaagactccgtctcaaaagaaaaaaaaaaatagtaatctggactccaaaaaataaacaacactgggtgaccaaatctcatattacaggaaatgctcatgctttaaagggatccgtggactttgtacccttgcttgaactaagtcagcgtgacaggctgtaatccttccaaggggaatggtttgggaggattaattaaagggataattacccacttaactgttagtattggcctggttttgctacaatgtgcaccccattattggaatggatctcctcagtcactatgtaactcacggaacaagcccaagtctttcacgctattggtgggtgccaggggtgaactttcccctcgtggtgcaggtggtaaacatgctaccttaccgctgaggcggggcatggaaggattactgcctgtcacagctcacttagttcaagcaggggtgcgaagtccacaggctcacccccaccctttctcagagagctggtttcatatggctggattcttttgtcacagtctgcatttcatcctaggattgtcctgattccctaaatgaattgtatttttttgagacagggtctggcagcctcgaacccctggaggcttaggtgatcctcccacctcagcccccaagtagctgggaccacaggctcagctaatttttacttttttttgcagatatcaacctctctatgtttcctaggctggtctcaaactcctggactcaagcaatcctcctgccttagcctccacaagtgctgggattacaggcatgagcaactgcatccggctaaacaacctctcttcttgcaacactgtttccttgtgagctcattaacatgctaattaccacattccacaggaagatggattacagagcaataagacaggctgggttcaccctggaacgtgaccagtagtgacagcctctaacaatgacacaggtggggaccactatcggaagatggagattctggggaactgctaccagctgcagggctgagagtgacatatctgacatttgttcattgttcatctgttcatacagtcattcttgcatgagtttactggacacctgctgtgagcaggcactgagtggcataaaaattcctagaacagtctcatcagagaaaagacacacacagaaagagaaattatactacaatgcagttatggaaactcattcaacaaaattttactgaatgcttactatttgtcaggtaccgttatcgatgctgggagaagagaaaaggacatcattttgccctcagggagctcatggtctaacggagagagagacatgtgaacaactacaacgtctgcggtctaagaaaacactaaattggagacgtgttcaaagcagtgcaggggagggagcggagtgagacttccggggtcacccagaagggcttcccggcaggtaagttgcagctaacccacacagatgttaattacagcaagaaaagatctttcacagtgctccctgtgcgtcaggcaggctagaggtcttgtcaaaagtatggcatatgtatcacatgcaaaatgatttgaagtagaatgtggaccaatttttaattttttacttatgcatctaaatgtgcattacaaaaaaatataatgagaaaaccaaactttcaccaatatgattgctcagagtgaggctaaaggaatgagttttaaaactgatttgaatcacaaatagtgcttagatgtggagagcatcttaaatgtggcttgccaatgactggattttggaaagcaccgatatgcgcatctttttttttttttttttttttttttttttttttgagatggagtcttgctctgtcgccaggctggagtgcagtggcgtgataccggctcactgcaatctccatctcctgggttcaagcgattcccctgcctcagcctccccgagtagctgtgactccaggcacgcaccactatgcccggctaattttttgtattttagtagagacaaggtttcaccacgatggccaggaaagtctcgatctcctaaccttgtgatctgcccaccttggcctcccaaagtgctgggattacaggcgtgaaccaccgcacccggccacatgcatcttattttagtgagatgagatgtaggagttagcgaggtagggaaagggaagaacagtagacacaaggaacaccaactcaaagcacacaggagagagtgcacgggctgcctgagaacaggtggtggtgaagcacggtgggctgcggggcacgcggagggctggaggagtgtgcgggagcagaacccctgcttctgtgttccactgcctgtgtaaacttctcaggtcggttcccatggtcatgtctctccaggaagtttctcaatggcacacaccatgttaccctcccttatgtcaagcttgtccaacccgtggcccaggatggctatgaatgcagcccaacacagatttgtaaactttcttaaaacattatgagatttttttttttttagctcatcagctatcattattgtattttacatggagcccaagacaattcttcttctaacacggcccagggaagccaaaagattggacttcgccactttaagataagcggttgttgactttaagacaaaaaaggacactttataatgactaaaaaaatcaatccatcaggaatacacaccattataaacataatgtaccaaacaactgagcaccaaaacacatgaagcaaaaactggtaacactgaagggagaaacagacaacttaacaaaagtagttgaagacttcagtgcccaactttcaataatggacggaacagctaggcagaagatcagcaaggaaacagaaggctgaacaagctacacctacagaccactgcagaacacccaatcacagaacacacattcttctgaagagcacatgaaacatttgccaggaaacatcaaatgctaaaccataaaacaagcctcaataaaattaagaggactgatatcacacacagtctgttctgtgatcaaaatggaatgaaattagaaatcgataatagaaggaaatttgagaaattcataaatatgtggaaattaaacaactcctaaatacaaatgggtgaaagaagaaatcagaaaatttaacagtacttgaaataaatgaaaacacaatatacagaaatttatgggatgcagtgaaaacagtacgtacagggaaatgtacagctataaacacctatattagccagacatggtggctcatgcctgtagtcgcagctacttggaaagctgaggcaggaggatcatttgagtccagaagtttgagaccagcctggacaacatagcaagacctcattccaaaccaaaaaaaaaaaaacccccaaaccccaactatatttaaaaagaagaatgatctcaaatcaggaattgaaacttccacttaagaaacagaaaaaaaaagtagcaagcaaaatccaaagtaagcagaaaggaaataataaagattaaagcagaaataaataaaacagaatagaaaaaaatcaaggaaaatcaataaaagtaaaaatagattattttaaaagatcaaccaaatttctgaacctttagctagactgaccaataaaaaggagagaatgcaaattactaaagtcgagaataaaagagagaggccaggtacagtggctcacacctgtaatcccagcactttgggaggctgaggcaggaggatggagaccggcttgggcaagatagcaagactccatctcttaaaaaaaaaaggaaaattagccaggcatggctaggcgtggtggctcatgcctgtaatcccaacactttgggaagctaaggtgggaggatcacttgaggccaggagtttcagaccagtgtgggcaacatagtgagattgcctaaggaggtcaaggctgcagtcaagctatgattgaaccactgcactccacccagaatgacagagtgagactctgtctcaaaaaaaaaaaaaaggcgggggggcgagggaggccaaggcaggaggattacttgaggccaggagctcaagaccaggctgggaaacatagtgagaccctagctctacaaaaaagtaaaacaaaaatgagctgggcgtggtggcttatgcctgtagtccagctactcaggaggctgaagcaggaggatcacttgagcccaggaattcggggctacagtgagccatgatcaagccactgatttctagcctgggtgacacagcaagaccctgtctctataaaataacaactaagaaagaataaaagagagggaatcaatgctgaccttacaataataaaagggataataggggaatcgtttaaattgtatgccaacaaatccaataactaagatgagatgcagaaattcctacaaataaacaaactatcgaaaaactttccacaaagaaaatgtcagaca

SEQ ID NO: 357 - DNA, 31440 bp, Homo sapiens
aaccataggaggtagagacacgaaaaagccttcaaaaaatcaataaatccaggagctgcattttgaaaagattaacaaaatagatggaccactagctagactaataagaaagaagaatcaatagacacaataaaaaatggtaaaggggatattaccactgatcccgtagaaatacaaactaccatcagagattactataaacatctttacacaaataaactagaaaatctagaagaaatggataaattcctggacacatacaccctcccaagactaaaccaggaagaagtcaaatccctgaatagactaataacaagttctgaaattaaggcagcaattaatagcctaccaactaaaaaaagcccaggaccagatggattcacagccaaattctaccagaggtacaaagaggtgctggtaccattccttctgaaactattccagagaatagaaaaagaggaactcctccctcactcattttatgaggccagcatcatcctgatactaaaacctggcagagacacaacaaaaaaagaaaatttcaggccaatatccctgatgaacatcattgcgaaaatactcaataaaatacggcaaactgaatccagcagcacatcaaaaagcttatcaaccacaatcaagttggcttcatccctggaatgcaaggctggttcaacatacacaaatcaataaacagaatccattacgtaaacagaaccaatcacaaaaaccacgtgattatctcaatagatgcagaaaaggccttggataaaattcaacaccccttcatgctaaaaactctcaataaactaggtattgatggaacgtatctcaaaataataagagctatttatgacaaacccacagccaatagcatactgaatgggcaaaaactgaaagcgttccctttaaaaactggcacaagacaagtatgcctctctcaccactcctgttcaacatagtattggaagttctggccagggcaatcaggcaagagaaagaaataaagtgtattcaaatagaagagaggaagtcaaattgtgtctgtttgcagatgacatgattgtatatttagaaaatcccattgtctcagcccaaaatctccttaaactgatcagcaacttcagcaaagtctcaggttacaaaatcaatgtgaaaaaatcacaagaattcctatacagcaataatagacaaacagagagccaaatcatgagtgaactcccattcacgattgctacaaagagaataaaatacctaggaatccaacttacaaggaatgtgaaggacctattcaaggagaactacaaaccactgctcaaggaaataagagaggacacaaatgaatggaaaaacattccatgctcatgggtaggaagaatcaatatcatgaaaatgaccatactgcccaaggtaatttatagattcagtgctatccccatcaagctactactgacttttttcacagaattagaaaaaaactactttaaatttcatatggaaccaaaaaagagcttgtatagccaagacaatcctaagcaaaaagaacaaagctggaggcatcatgctacctgacttcaaactatactacaaggctatagtaaccaaaacagcatggtgctggtacaaaaacagatatatggaccaacggaacagaacagaggcatcagaaataacaccacacatctacaaccatctgatctttgacaaagctgacaaaaagaagcaattgggaaaggattccccatttaataaatgatgttgggaaaactggctagccatatgcagaaaactgaaactggatcccttccttacaccttatataaaaattaactcaagatggattaaagacttaaatggaagacctaaaaccataaaaattctaggagaaaacctaggcaataccattcaggacgtaggtatgggcaaagacttcatgactaaaacaccaaaagcaacagcaacaaaagccaaaattgacaaatgggatctaattaaactaaagagcttctgcacagtagaaaaaaaaaaactatcatcaaagtgaacaggaaacctacagaatgggagaaaatttttgcaatctattcacctgacaaagggctaatatccaaaatctacaagaaacttaaacaaatttacaagaaaaaacaaacaacaccatcaaaaagtgagtgaaggatatgaacagatgcttctcaaaagaagaagtttatgcagtcaacaaacatatgaaaaaaagctcatcatcactggtcattagagaaatgcaaatcaaaaccacaatgagatgccatctcatgccagttagaatggcgattattaaaaagtcaggaaacaacagatgctggagaggatgtggagaaataagaatgctttttacagtgttggtggaagtgtaaattagttcaatcattgtggaagacaatgtggcgatttctcaaggatctataactagaaaaaccatttgacccagcaatcccattactgggtatatacccaaaggattataaatcattctacgataaagacacatgcacacttatgtttattgaggcactattcacaacagcaaagagttggaaccaacccaaatgcccaccaatgataaactggataaagatgatgtggcacatatacatcatggaatactatacagccataaaaaaggatgagttcatgtcctttgcagggacatggatgaagctggaaaccgtcattctcagcaaactaacactggaacagaaaaccaaacattacccattctcactcataagtgggagttgaacaatgagaacacatggacacagggaggggaacatcacacactggggcatgtcaggggatgtggggctaggggaggaacagcattaggagaaatacctaatgtagatgacaggttgatgaatgcagcaaaccaccatggcacatgtatacctatgtaacaaacctgcacgttctgctcatgtatcccagaaattaaagtataatttaaaaaaagtttaaaaaaagaaagttgccttagtcacataactagtaagagacatggttgggaatttgaacagaggccaatcagttccaaatccatgctcttgatcattaagctgaacttatggcaggaacttggaagacatggtaaaatggggaaaaacgtggagccagggagacttgtgaaagtgccagtgctcccactataccctgaaagaagtatctagacttacttttttctaagtcctctcctctaattctctcaatctctctctctctttctctaagagatgggaatgctgctctgtcactcaggctagagtgcagtggtgcgatcatagctcattgcactcaaggaatcctagggtctagtgccccttctccctcagcctcccatgtagctaagactacaggcacatgccccaaccctcgactaatttttttattttttatttttgtagagacaggatctcactatgttgctcaggctgtaattctgtcttgaagcttgtccaatcaggctttcagccacaccaattccctgagactgctctcaccaaggtcctacacttcactaacacaaacagcctattctccatcctcatcttacttcaccagggagctcctggttttcctcctacttcactggctatttcttctgtatcatgtgttgattctccctcatctccccaacctccaaacccttggagtactccagagatcaccgctttgctcttctgtgtctaacctcactaacttggtggtccaattcacactcttgactttgaataccatttaaatgcgaacgaattctaaattctgtacaaccagaaccattctcctgtagccaaatgcctactcaacatctccatccccaaacaaatttagttgttcaataagcctctcatattttacatatcccaaactgaacttctgaatttctcctccaatctgtagggctcttcccacagcctttccatctcagtggattataactccatccttccagttactcagaccaaaacttttggagttaactgagacacctctcttttttttcacaagtcatatccaatgtgtcaacaaattttggtagtggaaatattgcgggattttttaagaaatcagagagaccgatggggttcaggaggatatttattatttaggtgcactggccaagtcagattaacatccaaaggactgagccctgaacaaagagttaagttaccttttaagcattttgtggggtgggagagaggggtatctgtgcagggggaagcatactacagaagtgagaaataaagacagttattcaattaattgagacatgcattacatcatttcttacttttcaagaagaaacatgttttgcgacttgagtttatctgtctagtgaccttgcagctgcacagctagagaaacagggtcttcacaatgcctgggaaaggaggagaggtaagtctcactagccacagaaaaacaggcagttaatttttaaagggctccagctctttctctttctcagggggagttgggttttgttacatacaactgagtttccgcttacacattatttaatttcttttaattcctgttccaaaagaagccagatacaaaaggttacatgttgtctgattccatttatatgaaacatatagaagaggtaaatccatagagacagaaagtagattagaggttcccaggggctgaggaagaaatggggactaactgcttatagggtacagagttttcttctgataaaaatattttggaactagatagacattttgttaggccattcttgcattgttataaagaattacctgagacttggtaatttataaagaaaagatgtttaattggcttacacttctgcaagctttacaggaagcatggtgccgatatctgctcagcttctggtaaggcctcaggaagcttacaatcatggcagaaggtgaaaggggagcaggcatatcacatagcaaaagcaggagcaagagagggatgtggggaggtgacagtcacttttaaacagccagatcttgtgagaactcattcactatcatgaagacagtaccaagaggatggtactaaatcattcatgagaaaccccaccctcatgatcaaatcacctcccaccaggccccacctccaacactggggattacaatttgacatgagatttgagtgagaacacggatccaaaccatatcagagatggtggttatacaatgcgataaacgtcactggattgtacactttaagatggttgttttatgttgtgtgaacttcacctcaataaaaaaaaatatttaatgtacattcagccaaaagaagatttggaataggaaaggtcatggagatatattaacagccatttgatgggtggtaaggaaaagagtggttattagactgttttgtggccctcaaaaggtagaactagatcgagttggtgagcattataaaaccatcacaaaaccctggagagaggacccagtgctgaagaaccgtttgcctgccatgagacatgagggaagtaccagtgaatgccattgaaagcagcatccctgggtccaagggatggtcaaaggaccactacccaacccttccctagcctacgcctccattacagatgaccgcaagatttatttgctcattgctgccaaccaaggctgcactcactgcagttgctatcagtttatcatgggtaaaaggaatgtgcagtagagaactaactaactgcccacctacctccacaatcctatcaggacaaatcaccatggctcacatttccttacatttggcatgtaagcccctcttactgtctgtcatctatctcctacacagttcacctaaactgttctctcctgacccaaccttgattttcatcccaaatgcttccttgccatctctgggattcctgtcttcaccatcaccaaactcccctcaatcttccagtttcctgttcaaacttttctcctacctccttgctttgtcattagcccgactgcctccctaggacatcacttcccctgcagatctctcaagatgacaatatttattctccacacagcacatacttcagggttggaaggcaggggcaatcttctcctttataatgagtgcctcttatatatgtttattcatctgccctcttgtaaaacacacacacacacacacacaaagaagaaataaaataactctgcttctttgaagcttgtgacactgagataaaccatctcactgtcctcattgtagtgacctctcaactcctcatgcaagattggctttggcacctagttcctgatcttcctttccctgtaagcacttctcatagtcttacgggacttcaccatccatggcacaaccaataccacagcccagatcctcagctctccaatgacattttcctccactagacttgagctacctccttccctaggcacagcctcaacctcgacaacacctaagactgtaccgtctctaaagtcacatgttcaaacacttcactctttaaccactgtctcctattcttgcaagtgtattgctcaagtatctcattgcaatgctttttacttctacctcattgaacctccaggccattaaacatttccttatttctaaccatcaggtttctccttacttgtttgtttgtttatttgtttcttttttttttttttttttgagacagggtctcactctgttgcccaggctggagtgcagtggtatgatctcggctcactgcagcctccatctccctggttcaagtgattctcatgtctcagcctcccgagtagctgggactacaggtgcatgccactacgcctggctaagattttgtatttttattagagaaggggttttgccatgttggccaagctggtctcgaactcctaacctcaggtgatccacctgcctcagcctcccaaagtgctgagattataggcatgagccactatgccccacctggtttctccttatttatttcaagtctatgctgcactattaaaactgccttgacaaaaattataatagtgagaaaattatgacagtgaaagagatctgaaataatcaacccccatcttgcctttaccttccagactgcccttaataattcctgagcttgggccaagctatctttggcagaaatttagtttatagtttaaatgataatagcccttctccaaaactaaactgcctttgtaaaactaataaaagaccaccaatgaaaggttaggaggatgagaggagcctgaattctgctaaggtgtagatgtaaacaattaccaactgttattccggaggtcacaagatttgcaacatcgccaattactcctgcagataacagcactatcatagaatctgattggccttttgagatgtcttttcagattcttacatttcaactggtggctctacctggacccatcaacaagtcctgtggctccacccagaagcagacttaacatgcacaaggaccattttccacaccgctatgattgcatcccaaccaatcagcagcaaccattcctctgcctgccaaattatccttgaaaaatcttagccttagaattttgggggaggctgatttcagtaataacaaaaccccggtctcccatttggctggctctgcatgaattaaattctttctctattgcagttcccatcttgataaatcacctttatctgggcagcaaacaaaaggaacccattggacagttacactgttggcagatatatcttgcttccaaaattggatttttgtttaatgaatttattctgttttcttgatatttacaactgtgaatgttgtgtctgaattctctttatttcttgttgaaaagaactatattgctacagccagtacatacagatggatagctaattactcaacacggggggatgtgaccatcaccgcactgtgcaaatgaatgttacccattgtccacttttcccaaactacatagtgttatatggtatatgacccaatcaacggtggcaaagctccagaaataccacatagacatcagggacactttaaactaatcagcctatagtcctttttcagtaatttccaaacctggttgtgcatccaaatcacttggtaacattaaaaaaacaaaaaaatatacacgcaacattcgctcccaatcctactgaatcagaatattttgggttggttcaggaacattcaggagtttttcagggtccaaggtttatataatttgaggtctctctttgagaaaaggaacgtaaaagcgtcttgcttttatagatcttacaaagatgtattaccatgtaaacacattcctaggacccaggcccttgtaatttaaaggtttatctaagtaatgggccctgaagcttaattttcattatcttcagggcaaattacctgtgggttagggtttaggaatatatctctctgtgtatgtgtgtgcacattagcatgtacgcttgtgtggattttttttttttttttttttttttctgagacagagtctcgctctgtcgccaggctggagtgcagtggcgtgatctctgctcactgcaaactccgcctcccaggctcaagcgattcttctgcctcagcctcttgagtagctgggactataggcacgcaccactatgcccagctaatttttgtatttttagtagagttggggtttcgccatgttggccaggatggtcttgatctcttgacctcgtgatccacccgcctccacctcccaaagtgctgggattacaggcgtgagtcaccatgcccagcacttgtgtggatgttttaagctcccaggtgagtgaatacaaaactagatctttcccttctgtagcatctgtactgtttactctatgcatctcaatattttttcttttagtatctttcctttttctctcttattacttcctcttgtgctatttttacacctccttttttaaaaaattttttcccttttatttctattgacctttagccctcacaatgattcctacaagccccatttctgtaaatggggattgaaataattgctggacttttgagagatagatatattaaattgcaaactggcagtagtgggggcagttgatacataactaggttttaaagtctagccttctgagaccactcattccatttgtgaaaagtgattctacttcttattatgagccaaaatatgcattcattcacccatgcattgatttattcattcaataaatatttgttggatgtccactctgtatcaggaatgtgctaggttctgggaatacagcaatgaacaaggtaatttttccctacccctaaggaacttagagtttagtggggaagacagacattaaacaaacaattgtgcaagtaataatctataattatttattacaattaaaggaaggaagagacatatggattatgagggcattaaagaggagacctagtgtaagtagccagttctcgtgaagggacatgtattagttggagttctccagagaaacagaaccaatggtgtgtgtgtgtgtgtgtgcgtgtgtgcgtgtgtgtgttggggtgtgggggtgtggtattttttatagaaattgtctcacacaattatggaagctgagaagtcccatggcctgctgtctacgagctgagaaccaggaaagccagtggaatacttcaaagtccaaaggccctggaaccaagagtgccagtgttggaaggcaggagaagatgggtgtcccagcttaaaaagacagtgaattcactctttttgctctacatagggcctcaatgggttggatcatggccacccacattggtgaaggcaatcctcttagtctaccaattaaatactaatctctttggaaatactctcacagacacactgagaaataatgttttatcagggtgatagaaatcttctggagttaaacaatggtgatagctgtacaatcacatacatttttaaagggtgcgttttatggaaagtgagttttatctaaataaaatttctaagaaagagacttaacacagagataaacataagcacatttattgtcaacctttatagtgttatgtcaaataggtctgacataagcttaaataaatatatactttaaaaattataaaatattttaagttataatttaaaattctcaataaaactcaaacacaaaccacactggtatttcacacagctaatttctaatgcagtttacataaatatttacaacacttaaacaatttcaaagaaaataacactgtattccatacatagcctgatcacagtagttgttctctcttatttcccagagtttttctgcccctttaaaagaacctctgctgttctgatccttatcacatctctgttttgactgttggctttgttgttgccagtgttcagccagaacttctctgaaacttttttttcaacacatgctaagttaatggaagtgtaggagagttttgattctcacactcctcaaggctagagcagctttggcaattactgactgagaatttttcattgccagtgatcaactgaaaactggagattcctttggaattgttaaatctgcttataaataaacataaatgcttgctcacacaggcattcctctcttccagagcaccctaacatacagaagaaaacaaatagggaataactattagacatcttcattcgttaaaaatctaccagatgactcttttacatggtgagtttctattgtgaatttaaaatcttccataatatacaagaattatgtttacatatcatatctgacaaacatctttgtaggaatgcaaagcacatccatctttctgtattcttttccaacaaagacattcataaaattatacctttgtgtgtttgcatttatgcttttattagttcaaaacgtttggcctcatggaagtttttcatcgtggaaaccacatatttctgaaaaaatatctgacaatatacaaaccttccattcagtttttactctccaattctaccatgttttcaaaaaacaactgtagtaaaaacactcagaactttattctggttaacatcatgccttgctaggggacaatagtttccctttttgaaataaatttaaaacagatgtaacataatttgttaataaacaatgagggggtaatctagaataagtaacttttaccatatcatagttgacagcatttacaagttttttaagtccctaccacacttgtattgaatgaagaagtatggaagattataatatattcaatgcaagtaaaaatatcacaatccttaagaactctttaagaagcactgaatcccatagggatgaaagtgattaaattgtgcatagtaaccctcgcacagagcattcagtaggatttgcaccattaacaaccctccatgcatttgcctgtgggcattcaacatctgtcatttttttaagttataatatttttagtcatttttttcctctaaactctggataattattattcattcttatgacagcaactgtgtaatcagctgtcgaaacactgtgaagggcaaaagaaagaaagccacaaaatattgtgtttctgtgccaagattttacagcgagcaagggagagttagaaaaggaattctgagatttcagagtcttggtctcttcacctttgcttggaagaaaatatcctttcccttcattagccaacactttcttgatcctgagagtaggaaagggaacactgagtcttttcagttgaaggccgtccttgcctgctggactttgatctattgaagtggtgatgggtgttgcggtttcagccataaaggcatctggcatagtaggcaagaagggccagagacccgaggagagttatctgtctctgttaacttcagtgtatccctctagttccccagatgcacctgtttctgtaaatataaacatgcatgtcatcagaacacttaatattctgcatactgatcatgacaacaaaatgtaccttctaacacagacactctcactaggatagaccatgtaggaacatcgaattctattcagttaggacagtgatgatgtctacatattatacctctgtcaaaacctacagaatatacaacacagcacagagtgaattctaatgtagcctgtggacattaatgaataataatgtatcaatattggcccatcagttgtaacactaatataagatgttaataacagggggaattgaaggggtggtggggagatatgttggaactctttgtgctttctgctcaatttttctgtaaacttaaaaccgcacacacaaaaaaagttattttaattttttaaaaagtattcagagggacttgacctttccaaattctctcaaagcaggtcggagtagttaagaacacaaattttagaaccagactgccagagtttgaatcctggctacaccacttactagctttgagatttcagacaatttacttaacttctctgtctcattttcttcatctgtgtgataagaaataaagtaacaggccaggcccagtggctcacgcctgtaatcccagcactttgagaggccaaggcgggtggatcaggagttcaagatcagcctggccaacatgacgaaaaaatacaaaatctctactaaaaatacaaaaattagctgggtgtggtggcaggcacctgtaatcccagctactcaggaggctgaggcaggagaattgcttgaacgcaggaggtggaggttgcagtgagccaagatcatgccactgcactccagtctaggcaacagaatgagactccatctcaaaattaaaaaaaaaaaaagtaaaaagaaaagataagaaatatagtaccagcccctatctcagagttcctagcttagaaaaattcccagaatataataagtgcaatgtaagggtcagctatcttcattattattatctatcataaatgaaattacacaataaagctagatccgtttctttcctctccttctacaaaaaataaagcaactttccagaacaatacccaggtgatgatttctcccctgctccctccctaagatattggcaagtttggagggttcaaggagaaacagagcatgtagagaagatacctctctcataaccatttgtgatttacaagtcttacctgattcttttgaacttaaaggatgtaagaaggcttttggtagcttccatctgattcaaggctttggcagctgctgtggaatacatgagaacactaggtaaagcactgtcttccaacatgaagagagaaaaatatgtggaatgttcaatggcatgctttgtataagaatgcaacttacctggcaggaacaaatttctttgctgcaaaagaaaagacaaacaaccattaattcagactaaatgacttttaaggatatattaaatccagatacaatatgacttaattcatcaagtgttgcaaactcgatgcttcagggcctctgtaataatcagagcacaagcatggctctgtggcatctagggtaaaatgcaaagtgcacagccatccaaagggcatagcagcttcctaatgccagcaaatagctacggggtcatcttgcccaattcagctcccaatttttcatgagaagtccaaagtcttaatttaaatgtgagatttcctattttgtaaacgtcagaacttaactcaaaaatgttttaagtactcttaaacatgtaagccaaacaaaccatgagtgtagtcagatgtgcttccatattccttatgagagactctcaaatttaagcctgtactccaaataaatctccttaggaagaattttatccattttccttagagtgctcatcatggcagttccattgcacaattccgggaggcatcatataattcaacatgaatagcaccccctggagttgtacaatattaggcacgactaacatttttatttcctgaaacacttcccacactgagttgtactactaactcttttcttaatacttctgcttaattatactgcattttatccagattctaattattgtttaaatcagtaagcaagaccatgacttatcaatgagaaagaaatgtattttcaaaaacatttttgaagtacattcataaacttcctcacctttccgtaagcatttccgaagccagaggagaaatggtgctaatgtcaggagggagagtccagcagcagaaagtccagctaccaagggaatgttggactcagtgggagctaaggaagtaagagacgaagaaaggtcatgaggaagaattgatgttaaagtctctccgtcctgtccctttggccttttttctgtacattcattactaggagcagaagagctatctagtttaatacaagaagcagagatgtggcattacaggcctttgagatctgctccaagccacctttgaagctatttccaccattggcaggcagaactctaacttgccaagctcgttcacaataccacaccacaccttggttaataaacactgcacttgcttgctctcttgctctcactccctcttgttttccatttcccctttctcctctcctctctctgtctcctttttccagttgtcagaattctaccctttccatcaacatgcaacttctgttttttctctatccccatacaacttaatattcacaacttgtcaacctgggcgaactttctggtttggatataatgaatagttgattactgtaacaagatagctccccctttttctttttaatcaccagacaaccaccatcaatcaatgcatcaccttcacaggtaggtagcaggccagaccagtgtcctgtggctccacatgtccgagctgcagagccattgagcgtccatccttcaggacaggcgaacttgcacacagtgccaaacacgggctccccactgcagctcatgttgatctttcccggaactgccaggcttgaacattttaccactgcaaatgttaggtacacaggcagagtttcagaaaaatctactggaaaacttccaaaacttgcttaaaagtcaacaatgaatgtaaagtgtaagcgctacttagttttcagcatgtaggaaattaggaccaaacccctttggggcaatctaggttcagaaactttatgaagtatttgacctgtaccctaaaaaagtctgcactcaattctaccttggcaggaaggaacctcttctgtccattgtccctgagatgtgcactcaagttgagttgatccatgtaattcaaatccctcctcacagctgaaggcacaagaggacttgtaggtgaattctccaataggggaatgagcacacctcaccaaacccttcgggggctggtggacagcatcgcatctcacagctggaacacacgagagagcactttagaagtttgtttgcatctccagcaatacgtttcccaaggtaaccaagttcccaagctcttcaatagttctttttatcttaaaataaaataaaaacaaagactgtaccttcacatgtgggcttctcgttgtcccactcccctgtggggccacattggagccttttggatcccttcaacacaaaaccctgctcacaggagaactcacagctggacccataacggaaactgccagaagcactaggaagacaattcatgtagcctcgctcggggttggacaaggctgtgcactggaaagctgagacatcaaaatgatggtcagaaaatattgcagtggaactagagagtacttggcgtttgttgagtgaacccagttcattcaagcaacacttggagaactgaagattctttataattccctggacaaatgggaagatggctgtgttttctttgaatttcagccccctcactgatcatggcactaattaaaagactaattaatcagaacattagttcctgagcactgttcttctaacacacaaaataaattatggtccaaggaaagatttcacgcagtctgaggacaacatatgggtcatggatgtttatagatggtgccaaaaagaaagaaaagaaagcacccctataaaatttgtctgttttgcagtttggtttttgtgttatgttttgctactggaaatcattctgtgctggctttggctaggacaaggccagtgcctgatagtaaaaactgcttgttttcaatatccttgctctcactttaaagtgaattaaaatttactgcttatatatgcatcaatactatctctgtagctgacaccatgcttgaaacagtctcatcactgctaattatgagccatttcagaagacaggtgtgatgagagttttacattcaaatcatgttctcattattctgctttccgaattttctaatatgattcctttagattaagaattctgtctattccatgctaatgtctacaaagttttatcagcacatcacagttaaaaaaaaacagcaaagaattcattcttaacacatatgatcctttccctggccaaacattagttcttttaaatgaatctcaaagatacgagggttgctcatcaaatctgatttctatagttaaagtgggtattggttttttttttcactgtccaagtttgaagatggttgttctttaagaaagtataaatcgaaggatctcaagcttaccttcacaaactgggatttgctgtgtccactgcccttgagtggtgcattcaacctgggctggtccctgcaacatgaagccttcctcacaggtgaagttgcaggatgatttgaaggtgaactctccagcaggggaatggctgcacctcacagagccattctgaggctggcggacggccctgcatgtcacagctgtaacaaatatacgcattgatattagcacggcctagaattagcttgcccatttccagtatgggttgagagaaagaatgttcacagtaagtctccatgtggaacaactctacctttacacgttggcttctcgttgtcccaattcccagatgaggtacactgaaggctctgggctcccattagttcaaatccttcttcacagtcaaatgtacaggttgtgttccatgggaagcttccagggttttggaaacattccacgaacccattggctggatttgtcacagcatcacactcaaccactgaggattttaaagagcaccatgaattttacagaagaatgatcttttcacttcctattgagctgggtgcctaacagagtgaggaagctgccttcaaagggtagatcccaaagtcctatgtcaattcttagggacatgcacagccagaataaaagcttttattctttttcatggatattctatcttttctgatttccactttgcctatgctgagtggtctctaatctatgttatcatttacgtgaggtaaaaatttaaaaaaaatagattccagattaggagttatgactagtactgacatacgtaggctattcatttattttagcccatcagagcctgaagaactgatttttctttttttggcctctggttcagaaagataaaattaagagagaaaaagagatactaagactgcttgactatcatggtcttaagttagtcccatggcttggaaaagttaaacagggaaacaagatgagaaatccattgagatttctagagctttattgttttatggtctcccttacaaatcaccagagcctcagaaacacccatttcaagcatagaataaaaaaacctctctcaacccaagcaggtactgggttggcaatatacattggctgagagaacaaattgtattaaaaacaaaaacaaaaaaaaaactttccctgaagttttgaaaatgtaagttgaatcaaaaaacagaagcaatgagggatgagttacagaacgttctgtgcattctcagagggatttaccattgcaggctggaataggagcactccattctccagaggacatacactgcatggtctccatgctgcttggcaggtaacccctatcacagctgatagagcaggaagaattgtagctgaagtttcccagtgggtgactgcaaaccaggcttccatgctcaggggattccagggctgtacagttcacaactgaaaaagaaacccaaatcagttctgctcatctctcacctttaacagataagaacactggaaactagaactacagtttggttttttttttttttagtttaaaaatttataaaatttctaatggaatttgtaaaattgactgtaattctaccccttttcttttattcaagaaaatgctgatccataacaacaacaacaaaaaagcagtgatgacaaccataaaaaagaaatattgagtgatatggggagagtagtgtaattgtgtttacctcaaaactgttcaaattatatgaacaaacacagcaaacttaggtaccacaacaaatttcttgttacttttctcacaactgctaaaaatactacagtaagcttccaaccaggatgagaaccattcacaaagctatatttcaaatttaagtactagaatacattacaaattttaaaaccctaatgctgcactgtctactatagtagccactatctgtgtggctactcaaatttaaacttgaattcgttgaaatcaaataacatttaaaattcagttcctcagtgtcaccagccacatttcaagtactcaataaccacatgtggctcataggtacacactggaaaacacagctatggaacatttccattatcacaaaagctctactgcacaacgctgtgctaaggaatcttggagagaagctcatctaactctcttaatgtacaaatttaggaactgagacctcatttcattcaagtgacttgctccatgctacacggctagtcattacagagccagaggccagagcatgaaccaagataccctggactctgtaactcactcatttctactgcaacgtcttgttaccacctagatgaggtgagtacatgttcctcgcagggacacagaattacagtttattgaatgtgtcctgtgtgccaggcaccatgtaaccatgagcctatgaagttcacactattattatcctcattttacaatgagaaaactgacatagagagttaaactatcttgtcaaggtgccaaaataaataactggtgaatctaggactcaaacccagcagggtctgacttcatagtctcagctcacgatcaccatatgacaccatctgcaccagggaagggaaggcatgcagacctgactctaatgccagctaggacgtgagatggtgctaccatctcaagtgaagaaagaggcaagaaccagacttactttgctcacacttgagtccactgaagccagggtcacacttgcaagtgtaattattgatggtctctacacattcaccgtggccactgcaggatgtattggtacaggcagctacggaaaatacaaagcatgatgaggaggactattactgtgcttatactgagtgcctttgattttagaatcaacagtgtgcaacagagacatcagcagtcctacagagtgccatagactttaactgaagtgttttacaaagttccaaatctgagtttcaggcccacctatcctaaaccttgatgctaatgtatagctgtggctggcacctaccgtagaaaatttacttcttcacaaactctgaagacagttcccctaccacaaataaacaagtaattaaaatatgtattgtgtgtgtgcatttttatatgtaaagaactacatatttgcctacagtatttatatatattttatatatatacatacacacatatatgtgtgtatatgtgtgtatgtatatatataaaatgtatataaatgctgtaggctatatatatatacacacacacatatatgtgtgtgtgtatatatgtgtgtgtgtgtatatatatacatatccacatattcttgcccacattcacacaaaacagcaaaagagagaaactttagcagttaaacagaatcttttggaacataaaatgaccacaatagagagcagtttttgcatgctgtaaatttgccaagatgcccacacactgaaactacctcccactgctgccgcaaactccctacctgtgtagcatagggcaagcttcttcttgctgcacctctcatcattccacatgcccacatctttttctctcttgatgtagatctccacgcagtcctcatctttttgcctattgttgggttcacctggagcccagttcttggcttcttctgtcagaggtttctgggttcctacccagacccacacattgttgacttttctgattccaatccagtaataacttggtgaatagctcaatatggagtttaggtactcaatctcttctttgttttgaattgcaaccaggtgtgtgtacctttgctgacaataagcactggcctcatcataagtcatagcttccgtggaggtgttgtaagaccaggctccactctctttaatgagaagcactagtgggagaaaaagaaaagaaatggtagagtttggtactgttgtggtttaactctgacaactgtgctttttattgtcttatttttggcaatgtttgtgacatggcccagacttttctcatcttttcaaaagtaagaagtacgtatgaagaaacagcgacttattgtttatctcttttgtgactgccacccactaggtaccttatccacactcactcacaacattatagtatacccattttgtagtagaataataatcagaataactaagctttattgagcacttagtatgcaccaagaagcactgtatgaggtactttccatgaaccatgctattgaatcctcacaatgcatctgggaaataggtcattatgatccacactttacacttaaggaaagggagacaccaagaggtaaagtaaatgaccccaagcccagggaagaacacattgcaggtagaggtcaaggatgctgccagatatcctgtgcaggacagccccagacaagcaaggatatttcagtctgaaatatctatagtgcgagaatgagaaatcttggtctaatggcactgacttacccaaagtgagagctgagagaaactgtgaagcaatcatgacttcaagagttcttttcacccaaaggtttaggcttgaaatactttcctggggagataaaacacaaaatgaattaaagaaggaaatcgtgggtagctagttacattattctaccatgatgtttaaggcagcatcctaagattttgggcaaaggacactagtgcaataatctttatttcagagtttaatcaaataaataaacaaattttaagactttcattatttaggtcaaagagaaaagacaggttttagctacaatacaataagagcttgtacagatgtggtttttattagaaggccttttgcatatctgtgtttcatggcccgaggctgcccttataaagcgttctgcacttaccgttttgggaagcagttgttcaaacacaggatctctcaggtgggtatcactgctgcctctgtctcaggtcagtataggagttttgatgtgaagtcagccaagaacagctgaacactacttcggctgaggcccttttataggagggattgcttcctgtgaataataggaggatattgtccacatccagtaaagaggaaatccccaatggcatccaaaaactttcccgggaatatccacgatgcttaaaattacaatgatgtcagaaactctgtctcttgaagctacttcacctttgtccatgcctttatatcgtatatgcaattttattaatatgacaaaaatgcatgatttttaattataataacataaagtctatgtctttaaaaagttgtaaaactttgcttgttagtagtgtctctcatgtagttgtggtagtaattagaatttcagaaacagaaggaaaccaagaataggtttgtcatccatagtctactaccttcaatttctcattcatagctgtggataaccaatcactactcattttttcttcctttttcacctgccaattcaacatatttaacatgcactgtctcacagaggaatgactcacaaggtagatattaatcttcagattttgcacggcagttatgcctaaattaaaatattatctaaaaataatatctaacactcaaatggttaaaataatgccttattttaaaaaaagaaaaatgggaaatagatatttacatctgggaaagtttcatggtttgttcagtgaaaaaaataaaaaggaggccaggcacagtggctcacgcctgtaatcccaccactttgggaggccgaggcaggcggatcacctgaggccgggagttcaagaccagcctgaccaacatggagaaacgccatctctactaaaaatacaaaattagctgggcatggtggcgcatgcctgtaatcccagctactcgggaggctgaggcaggagaatcgcttgaacccgggaagtggaggttgcagtgagccaagatcacgccagtgcactccagcctgggaaacgagtgaaactctgtcttaaaaaaaaaaaaaaaaaaagaaaagaaaagaaaaaaaataaaacggaaaactatatatatatatttaattggtcaaaattttgtttaaaatttttgaaatgttaatgtgcaaagaataaaaattcttccacaatgttaacagtgactaactctggatggcaggatttgggataatttttatatccttcattattattttcaggattttaaagtttttttcaatttccctttttttcacctttatagtaacaagaatacagtttaaagaaacttgtctctaggccaggcatgatggctcatgcctgtaatcccagcactttgggaggctgaggtgggtggatcacctgaggtcaggagttccagaccagcgtggccaatatggtgaaaccctgtctctactaaaaatacaaaaattagccggggtgtagtggcgcatgcctgtaatcccagctactggggagcctgatgcaagagaatcgcttgaacccaggaggcagaggttgcagtgagctgaaatcacaccattgcactccagcctgggcgacagagcaagactccatctcaaaaaaaaagaaaaaaagaaaaagaaaagaaaagaaatttgtttccaaatgcaacagaaggagatgtatgtggtatcctatattcctgctcttcattttgacatttcttctgggtgattgtatacattccccatctctgcatcttaccctatctaaatgatggtaacagtaaatggggatcattttaatttccatattctgtaggttttcagagctcaagtcaagctaatattctatatctacagcctttcaaaataggaggtctatctaaaaatgtactgtcagcagacctgaacgagtagtggtaaaagcctcgtttttctctttacttgttagcactggtctttctgtgttcataaagatgtcaagacccaaaaaaaaaacaagaaaagagaagaaaaattccaaaaaagacaactgattagaaaaaaataacttaattaacgaatttaattcaacccctatcaaaaagcatagaatttattccctccaccttaccactctcttacatgatccagatactgacattattccaattctttatcccactttacttagctcaatgtggttgttgcttcaataaattcagaagagtaatcactcatatagtgtttatttagattttagggcagaatgtcaagttgggttaatacattatctgtatgtattttatttttaataaagtatgaatacataatctgctatttttaaaaagcatggtcaaatgtatagagtagccaaatcttaaaaaacaatttatcttcgatatcaataaagtacctaataattatattgctaatagaaattagtcgttaacatccctagataactaactttattattgcgaatttttcataactaagtttatagtttatctcttcccctttttaaaattagttcaaagatatctaaaaatagccccagtggtgatgaagtttctattttacttacatatatatgtcctggacccccaattataatctctaacatttattgagtgcttactatgtgccaggccatattctgagcattttgtatgttcacctattgattattcaatccgtacaacagcctatgaaataggtactcctattatccccattttacagatgaggaaattgagaatctggggattttatctcattcaaaagcacagagctaagggttgaaaccaggcagttgatatccagagcccactcccttacctgctactccaaaccatgatttcttttgttgttatgccccgagattccttgttctacccaagtttcctgtactcttcttgccctcttcttcctgagacatccttgaccatcacagctctccactgagataactgtgtcctgggttctgagacatgggggctggaagggaccccagggacagtgagcagtagggagaggatgcagtgagaacagaccctggatccccggtgcataggcagggagaaagtggacaaaggaaaaaacaagcaaggcaggtggagccatgcctaggtaaagttgatccctaagccacagttcccagaagttcctgattcaaaagcaaattttctctaaggtcaaagggcaaactgattattctaaattctaaactgattatttctaaattgagaaagcttcagggagagatcccaatattcgaaggataagagaaatgaggagtggaagagataggtgagtaacagtaacttaaatgtagactatatataatatataatatatgtagagtatatatatataattacaatatattatatatgtggaatatatatattatttatatatatttatatattttatatatatagatatttttatattttatatataaatatagatatttttatattttatatataaatatagatatttttatatatattatatataaatatatgtaaaatactgtgaaagaagaatagaatcttgagacctcaaattcactatgccaaagggaaagttaagcttgggaaatgagtcatgcaaaaactgccttccttttgttcccaaatacctgtaatttcacatgcttactttatcttatataaaatgtagatgtactgagcatgagatccatgcataatttccctctagtcccttctttttacatgtaaagtgtagactcactgagtgttacagagccttgccacaatgtaaacacttgtctcattgccaacccatctttcgtttattttcttcccctcctgcttgctctttcccctctaaagatggaagttcccaaaactctctttggaaaaagcgcaggtcacagatcctacagtgatttgtgtttcttttacctgggacaaaataaacctctaatctgttgagatatgcttcagttactttttggtttacaatatgtacatgtatgtatataatttatatgtatataatatatgtacttgttttaaccagaggtatgttattcaaaatccattcatccttacaattacctgcattctcccacagtattttctgtgtccctgcccccgaggttgtcactgcaaatcaggtacatggatactgggagctgatgggctcccctctggctacctgggctgctgaaggggccatagacagacccagctttcctctcgtggagaggccctgggccagcgctgcgtgggagtgggattacaaccagactatagcttcttcacctgctttttcctatcaggatttcataagaggcaattgcttgttttttgagggtgggggcaaatcagggggagttgaagaggaaattgggtaagatttgaatagttgggcatgttgaatattatgaatatcatctccctcttcaaataatccaaaatatacccccaagaaacaggctgattagaggtgcttcaaggctccactgaatctcccaagctctgaagatgtagctagctgttaccggattgccggttttcaagcctcgcctcacatggaccctcttggcagtttctcgcatgggggaagcatccgctacatagatgggaatgaaaagaggaaagaagacggtgcaaactcaggcacaccccggtgtctgccaccagtgctatttaatctctgaggtgtcacccttcctggctttattgtctcttcctggaagtctcttgtcctctcctccacaccctttaatcaggcatcaaagactttaaccagttttgctgtgtgcccaggcccactcattctcacttttatggcaaagggagtgggagacagagagatagccagaaagaagagattggggaccccaagacaaatgttagaattttaaccaaggccaccctgtggacaggagattattgggtttagtggaaagcagcactggccacaaccacacgtggcaaaagcatctatcgaggagtgaagttatatttggtgaatgtgaccgggaagcaggggcagtggtgtcctcctgccttcctgaggcactctgttcccttacctctgcgaaggcttattttacccctgagtgcttagttttgaaagccttagttccctctctcccataaaaaagctctactctgctaacatctaagttacctttgcagagtcttaggtagagggaggaaatcccaataaagattccaccctatctgcaaaatacaaacatggtatttcttgcattcccaaaattgtgaaagaaaatgtgtatcaccacagtagagaatggcattttttgtttgatcaaaacctaaatatatttgatgaaaatgtgtctggttctaagtttatttcccagaaagccatgtttactcacttggaatttatagacatcttataatatctgagtcgagtaggagctccgggctctacctcactcttttctcccacacccagggggaagtgtagggttctcagactttagaataaagaggaatcacctggacaactcacctaaaatgcacatcttcaggtctcatactcagaggctctgactcaacaggtctgggtggcgcccaagaatttgggctttaaatgagtatctcagatgattctaatacagaatgtgtaagatgaccagatcctatcacacttagatgtattggcctagggccacctaacttggagaaaatgttagtaagaccccgtggttggtgctcagctataggtaccagaattttgatcaaaatttactatcattgtgacacttctcttcggaactggaaggccagaaccccacttgtaaagtgctgggaaaatacaaggaaaatttagggtgagtagcattttgaattcttacacatggaaagtaaatgtataagaattcttaccaataaaaaaaaagcaagagagaatagctgctaaagaattaacacaaatatgtatatattagttattctcttttctcctctgattccagaggactttgtaattccactaattcttcttgagcttccaggatgatctgagacttgaatttttcatgtgctttttgcttcctatttggcagcatcttatcttgaagtttccgctttctgcttggggacctaaaaactaactaatgggaatttcttcaaaatgagcaaactctggtgaattcccaaagcggaagaaacaagtgaggatcgggctggttaattaagagaacttttcctgaatgtagccagactgtttgccgactgttgttaacatgagggaagaaatacccctggattttagaagagccccttgtttgttttccttggccatttgtgctgcttgttttgtaagtcagaaatttcctgaaggactattattagctttgttctcacgtcagaaaacttctgctctggccacttttaaacatataacttggattttactgtattagaaaatgtaacaattacagacagcactaaaaggacaccaaagggcaaagaaaatgggtaacttttttttcttccccaaatctaaaataggtgattttggagaagtaggagaaaaacctggattttctagatctctttagagctcaacaactgatatagttaattatgtaagtctttgatatttggaaatgattggattaaccggataacaatgaatatttaaatacagtgatttggccaggagcagtggctcatgcctgtaatcccagcatttggggaggctgaggcgggtggatcacctaaggccgggagttccagaccagcctggccaacatggtgaaaccccatctctactaaaaatacaaaattagccaggcgtggtggtgcaagactgtaatcccagcaactcgggaggctgaggcaggagaattgcttgaacccgggaggcagaggttgcagtgagccaagatcacgccattgcactccagcctgggcaacaagagcgaaattccatctcaataaataaataaataaatacagtgatttaacacaagagatttctatttcacactaatgagctctgtcactggggcaagcttctttgcctcattaagtctcagatttcccgagagcttatttatttataccaagagtgctttactaccgtctctgctagctgtgacataatatgacaaaaggtataaatatgggaaaaggcactaatttatatcaaagcgttcttcgtttttccttgctgtgaagtttttagctaataattcataagaatataccatatttagagtgtttactatgcatgggcctggcacttcacatacattgcttcttacaaattttacaaagtgaaaggtagatattaatctcattttatggaggacaagatagagatctggagaggttacataacttgccagtgttttttcagttaataaatggtagggtggagattcaatctgtgttactctaaagtccgtgtcctttttattggctccatgcctactcagatttaaatctcagcagggaagtaaaccttagtttttacatgagaaaatgttacagcagccttctcggcttcctttacccccatcccagtttcacgagcttagtgccttagatcgggttcctttagaagcagacctcgaaataaggatgtgggtgccagtcatttattgaaaagatgatcccaagaaagcctagtaggagagtgaggaagtgagatggggaaaggaagaaactccacaagaagtgtgttaataagcaggttaccgctgtgggcagccatggggctcagctgcactaacaaactctgtctagtacagaaaacctcagggtctccccaaggaggggcaagaagtctgcctagggtatatatccgccaactcagtcactggctgagagctgatcctgggagggcatggttaattcctctgcactttcaagtggattcctgtggtcagaaaaagccctctacaatgaattccagatgcttgtatttaaatctgacatgatctgaatgctgtgttgggacagggtgggcgttattagttttctgtcattactgtaacagattactacaaacctgatggctgcaaacaacacatatttattatgtcatagtttgtgtgggtcagaagtacaggttagctcaactagtttctctgctctaggtttcacattgccaatatcaaggtgtcatccagttgggctcttcttgggaggcttggggatgaatccactttcaagctcattcagattgttggcagaatccagttccttgtggttgcaggaccaaggtccctgttgccttgctggctgttggccaggagtcattcttagcttctagagactacctgtactctctgactcgtgtctccacttcacctttcaaaccagcagcggctagtcgagtccctctcttcaaatgtctccaactgtgccttcacctcatttctcctctgtgtaccatgtctgcctctactgcttgtaagggctcatgggattacattggatttattcaatccaggataatctccatattttaaggctagctgactagtgatcttaattccatctacaaagtcccttccaatagtactgtattagtccattttcatgctactgataaagacatacccaagactgggcaattcacaaaagaaagaggtttaattagatttacagttccacatggctggggaagcctcacaatcatggcagaagtcaaggaagagcaagtcatgtcttacatagatggcagcaggcaaagagagagagcttgtgcagggaactcctctttttaaaaccatcagatctcataatacttattcactatcacaagaacagcatgggaaagtcttgcccccatgattcaattactcccaccaggtccctcccacaacatgcaggaattcaagatgagatttgtgtggggacacagccaaaccatatcaagtacctagattcatgtttgattaaacaaccagggagcagaaatcttcaggagtggggggcatctttagaattctgcccaccaaggctgggcgcggtggctcacacctgtaatcccagcactttgggaggccaaggtgggtggatcatgaggtcaagagatcgagaccaccctggccatggtgaaaccccatttctactaaaaatacaaaaattagccaggtatggtggtgggcacctgtagtcccagctactcaggaggctgaggtaggagaatcacttgaacccaggaagcggaggttgcagtgagccaagattgcgccgctgcactccagcctgggagacagagcaagactgtctcaaaaaaaaagaattctgcccatcatagtaggctgtcctacagagacataacccaggaattaggtgaatggctaacctaaattagcactgtgatgtgttttctgacttggtccttatagctcctctgcttagatgtggaactaatccatgaatgcaagggtttgtctagagttttaagtgggagttaaatatccaaagtacaggagatattatgggtgcctcatccatgtccccttggcatttatctttcttggataacccaactctattagtttttatatctcacttgttcctatactctgtgaactgatgtcccataaatagacatttcattttgccagtcttcttgaacaataattacgattattaatctagcagttatcattaattggccacttcacattagacacagcacttaggacttaagaataccatgtcatttgatcatcataatatggtcaggaattaagtattgctatccaaattttacaaagaaggcactgagggttagagtttaaataacttgcttaagatgtcatagcctgtaagtgacaaaactaggactcaaatacaggtccatctgactccaaagtctatgttcttggctaccacactgcctctcctacaagtgacctgtggttttactactatattcacactctactaactttaccatctcccatgagtctgtctagaggagggcacacacagcacagaaaacacatgaatgcaaaataaggaagggcctacttactacacagagccattctaatacctgatgtttgctctaatccagttttactattaattagttgctggtgcccaagtttttactgagaa

SEQ ID NO: 358 - DNA, 41038 bp, Homo sapiens
ttaagaattaaacagctaagttcatgcagaggaaatataacaaaggagggactttcctacaagatctttgaaaaatggaacatttgcataagtcatatttagccagaactgttgttttatattttcctttctgaatactttgttacacctcctcccagccaaccccccccctccctgaccccaactagtcagagaccaaagccttcacaatggtttacacttgaaccttcctggccccaccctcatcatcacgcctgaataattacattcactgactggtctcccctgcttccgtttatctccactcctaaaccctctgacaccttaatcttcccagaataccattgtgatcctgttccactcttgctcaagttttcccagaaactagagtacaaactttataagctttagagttgaaagccactctatctctttttcatccccaggtctctgccaaggcagtataacctgtccaacatctctaacttcaatacctttgtcttagatactagactctcctcctggtttctaattaaacctgatctaggatctaattttgcctctgaattctgttgccctttgccaagtgatctcttcctcctctgagccgcagcatctctgagcttgcacacttagcatagccatagcacacacagccttagcttgcagttcagggtgtttaccttccctccccttccagatgctggatccccagggataggaactctgcccttatgtgtccatagcccctggtagtatgtcttgcagtcgtacattttcagcaaatgtttaattggttaattgaagacaactgtcccatgccttaagcctctctttttgctaaacatgcctgtgtcctttgtcattgaacaactattttgatctattttcttcctgacataggggtcagttccgaggatgctgaaatcaagagacatagcttattctctcaaaattgctttcaagagtgattttgttgtgaattgagaactggctgcctacttttggactacccacttcagcaagagtgtttgaaaccaaatctattctaagtaattttttattcccttttctctatggcattagacacacagctcttttaaactacctttcgttatctattaaacagacattcagtaactctatagacactgtctagctatatgaacttagacaaactaatatctctgagcttcagtttcttaaaatttaaaatgaggacaataccatctatggccggggattaaatgctatgaggaatgtaaaccagatgtcaggtaccatctctctaaaatccagataaaatgaattaaaaatactggccgcaaaccctctctaagagttctcaaaattctcagagagcttaattttcatgctcaccatagcaccgattttcttctaaatattttgtttctaccaaaatattttgtcccaattttgccttttatggctatttcttcatatccactttcccaaactaaagaagcagccccttcaccttaaactcctccttcaaagcaacctaaatacaggtctgggtttgtattcctagtgggatgttacagaggttagtgtgatgcagaggaggagtcatgctgtttaaatccatactagtccccagaggccaggctgcttctgccacccctacccctcccgccacagagctcttcagcttctcacatttctagttcttctctctctactttcattaccttctctctttttttttttcttctcatgtgctcacgggagcagagaaaattaactcctctaagttttcttaacacagagtgccttaattacatattactattgtttgagttcctgccaacactacgtctgtagggtcacacctgctatattagaggcttatcaaaaaaagatagctttctcctaaaaagggatttggatgcctactaagataactggatgccaagataagtttaacctaacaaactttattattattattattattattattagagataggtacttattctgtcacccagactgcagtgcagggatgcaataatagctcactgcagcctcaaagtcctgagttcatgcaatccttctgcttcagctccctgagtagctaggactacaggcatatgctactctgcccagctacttttaaaaaaataattagggatggggtcttgttgtattgcccaggctcgtctcaaacttctggtttcaagcaatcctcctgccttttacctccctaattgttggagttacaggcatgagccacagcactcaaccaagatttaaaaacttttaaaagaaatcacattacttactgttatcatcattatggttactaccagtgttaaaacaattggtattgaaaacaccactaccagatcaagcttcaaaccaagatgtcaagtaaatattattgtcagacctctgagcccaagcctgcaggtatacacccagatggcctgaagcaagtgaagaatcacaaaagaactgaaaatggccggttcctgccttaactgatgacattccaccattgtgatttgttcctgccccaccttgactgagggattaaccttgtgaaattccttcccctggctcagaagctccccgactgagtaccttgtgacccccacccctgcccacaagtgaaaaaccccctttgactgtaattttccactacccacccaaatcctataaaacagcctcacccctatctcccttcgctgactctcttttcagactcaacctgcctgcacctaggtgattcaaaagctttattgctcacacaaagcctgtttggtggtctcttcacacagaccatgtgacatttggtgccgtaactcagatcggggaacctcccttgggagatcagtcccctgtcatcctgctctttgctccatgagaaagatccacctatgacctctggtcctcagaccaaccagcccaaggaacatctcaccaattttaaattgggtaagtggcctctttttactctcttctccagcctctctcactatccctcaacatctttctcctttcaatcttggcaccacgcttcaatctctcccttcccttaatttcagttcctttctttttctggtagagacagaggaaacgtgttctatctgtgaacccaaaactccagcactggtcatggacttggaaagacagtcttcccttgatgtttaatcactgcagggatgcctgcctgattattcacccacatttcagagctgtctgatcactgcagggacgcctgcctggatccttcaccttagtggcaagtaccactttgcctgggtggcaagcaccacctctcctggggggcaagcaccacctctcctggggggcaagtaccccccaaccccttctctccatgtctccaccctctcttctctgggcttgcctccttcactatgggccaccttccaccctccattcctcccttttctcccttagcctgtgttctcaagaacttaaaacctcttcaactcacgtctgacctaaaacctaaatgccttactttcttctgcaataccgcttgaccccaatacaaactcaacaatggttccaaatagcctgaaaacggcactttcaatttctccatcccacaagatctaaataattcttgtcgtaaaatggacaaatggtctgaggtgcctgacatctgggcattcttttacacgtcggtccctccctagtctctgttcccaatgcaactcatcccaaatcctccttctttccctcctgcctgtcccctcagtcccaaccccaagtgtcgctgagtctttccaatcttccttttctactgacccatctgacctctcccctcttccccagactgctcctcctcaggtcgctccccgccaggctgaatcaggctccaattcttcctcagcgtccgctcctccaccctataatccttctatcacctcccctcctcacacctggtccagcttacagtttcattctgtgactagccctcccccacctgcccaacaatttcctcttaaagaggtggctggagctaaaggcatagtcaaggttaatgctcctttttctttatccaacctctcccatctcagttagtatttaggctttttttcatcaaatatgaatacctagcccactccatggctcatttggcagcaactcctagacattttacagccttggacccagaggggccagaaggtcatcttattctcaatatgcattttattacccaatccactcccaacattagaaaaagctccaaaagttagactccggccctcaaaccccacaacaggacttaattaaccttgccttcaaagcgtacaataatagagtagaggcagccaagtagcaacatatttctgagttgcaattccttgcctccactgtgagagaaaccccagccacatctccagtacacaagaacttcaaaatgcctaagccacagtggtcaagcattcctacaggacctcctccatcaggatcttgcttcaagtgccagaaatctggccactgggccaaggaatgccctcagcctgggattcctcctaagccatgttccatctgtgtgggaccccactggaaatcggactgtccaacttgcccagcacccactcccagagcccctggaactctggcccaaggctctctgactgactccttcccagatcttcttggcttagtggctgaagactgatgctgcctgatcgcctcagaagcctcctggaccatcacagatgcttttggtaactcttacagtggagggtaagtccgtccccttcttaatcaatgcagaggctacccactccacattaccttctcttcaaggtcctgtttcccttgtcttcataaatgttgtgggtattgatggccaggcttctaaaccccttaaaactccccaactctggtgccgatttaaacaacattcttttatacacttctttttagttatccccacctgcccagttcccttattaggctgagacattttaaccaaattatttgcttccctgactattcctggactacagccacatctcattgctgcccttcttcccaacccaaaagtggcaactcctttgccacttcctctcatatccccctaccttaacccacaggtatgggacacctctactccctccctggcaacaaatcacaccctcattactatcccattaaaacctaatcacccttacctgggtcaacgccagtatcccatcccacaacaggctttaaagggattaaagcctgttatcacttgcctgttacaacatgtccttttaaagcctgtaaactctccttacaattcccccattttacctgtccaaaaactggacatgccttacaggttagttcaggatctgtgccttatcaaccaaattgtcttgcctatccacgccatggtgccaaacccatatactctcctatcctcaatacctccctccaaaacccctccataacccttattctgttctggatctcaaaacatgctttctttactattcatttgcacccttcatcccagcctctcttcactttcacttggactgaccctgacacccatcagcctcagcaacttacctgggctgtactgccgcaaggcttcatggacagcccccattacctcagtcaacccaaatttcttcttcatccattacctatccaggcatagttcttcatgaaaacacacgtgctctccctgctgatcatgtccagctaatctccccaaccccaggactggcaaattgactttactcacatgccccaaatcaggacactaaagtacctcttggtctgggtagacactttcactggataggtagatgcctttcccacagggcctaagaaggccaccgtggtcatttcttcccttctgtcagacataattccttggtttggccttcccacctctatacagtctgataatggacaagcctttactagtcaaagcacgcaagcagtttctcaggctcttggtattcagtgaaaccttcataccccttaccgtcctcaatccttaggaaaggtagaactgattaatggtcttttaaaaacacacctcaccaagctcagcctccaacttaaaaaggactggacagtacttttaccacttgccattctcagaattcgggcctgtcctcgaaatgctacaaggtacagcccatttaagattctgtatggacgctcctttttattaggccccagtctcattccagacaccagcccaacttgaactgtgccccaaaaacttgtcatccctacaatcttctgtctagtcatactcctattcaccattctcaactacttgtaaatgccctgcccttttttacagtgctgatttatacttttcctccaaaccatcataactgatatctcctggttttacctcaaaccgccacccttaagtctctcttaaagtggatagaagatcttcagtgacaaggtacactccaatactttcaccctaataaagccctattctttacttttatattcactcttattcttgttcccattcttatgccactctctacctctccccagctatctccaccacactatcaatctcactcactctctcctagccatttctaatccttctttaacaaacaattgctggctttacaatttctctttcctccaaaatcaccgagtcctcaatttactcactgctaaaaaaggggactctgcatatttttaaatgaagagtgttgtttttacctaaatcaatctggcctggtatatgacaacataaaaaaaactcaaggatagagccaaaaaccttgccaaccaagcaagtaattatgctgaacccccttgggcactctaattagatgtcctgggttctcccgattcttaatcctttaatacctgtttttctccttctcttatgcagaccttgtgtcttccatttagtttctcaattcatacaaaaccgtatccaggccatcaccaatcattctatacgacaaatgttttaagggaggagaccacccctcatattgtcttatgcccaatttctgcctccaaagaaagaagtaaaaatgaaaaggcagaaatgaaatccacaggcagacagcctgatgccacaccctgggcctggtggttaagatcaacccctgacctaatcagttatgttatctatagattacagacattgtatggaaaagcactgtgaaaatccctgtcttgttctgttcctctaattaccagtacacgcagcccctagtcatgtaccccctgcttgctccccctgcttgctcaatcagtcatgaccctctcacgcagacccccttagagttgtaagcccttaagaggaaaaggaattgttcactcggagagctcggtttttgagacatgagtcttgccaatgctcccagctgaataaagcccttccttctttaactcagtgtctgaggggttttgtctgtgtcttgtcctgctacagtttcatctaacaaccccataatatcaccccttaccacaaaatcttccttcagcttaatctctcccactctaggttctcacgccacccctaatcctgctcgaagcagccctgagaaacatcgcccgttatctctccacaccacccccaaaaattttcactgccccaacactttaccactatttcgttttatttttcttattaatataagaagatagaaatgtcaggcctctgagcccaagcctgcacgtatacatccacatggcctgaagcaagtgaagaatcacaaaagaagtgaaaatggctggttcctgccttaactgatgatattccaccattgtgatttgttcctgcgccaccttgactgagggattaaccttgtgaaattccttcccctggctcagaagctcccccactgagcaccttgtgacccccacccctacccacaagtgaaaaaccccctttgactgtaattttccactacccacccaaatcctataaaacagccccaccccatctccctttgctgactctatttttggactcagcccacctgcacccaggtgattcaaaagcttcattgctcacacaaagcctgtttggtggtctcttcacaccgacacgcgtgataattattatattacttttaactaaaaccctttcagagtctcgcagggaaggctgtatatatctcataaaatgttggggcccactggatcagacaaggccacaaaggccaaagggaagtaaagatctcattatttctcctaataatttccctgtcctttgtcataaatggtgggtaggctgttatggtgatggcagattttctttccataaaatgtccataataggacatttgaacagaagggaaaaatcaaattgctgaagttgaaagagggcaatgcaaagaactttggagaaagaactgtacagagaagtcaactggcagatgggaggaagtttaaggggaaaaatatagatgtctaaagaatacatttattcattttccacagtgcaatttggacaagaagcctctttcttgcttctttctattctcattaaatcattagagctcaagcaatccttctgcctcagcttcccgactagctaggactacaggtatgtgctactatgcccagctaattttttaaaaattagattttaatttggtgaactatttctgtaggaaactacaataatacagcccaggcacattgatcttgggtgaacaaatcagaaggaatgaataattctgtgttcctgggactctgacaatttcatgaacttggtactctgagtaaagcataggaggagttatttcataaaatgtggagcacaatcatgtgacaaagataatgggatccccatttcataaataaatctgaagttcagagagagtaacaactggccagggtcacatcacggagacagaggcagggttcccactgatgcctctgactccctgtcccaggcccttcctcctcccgcaagcagaagtgcagggggcagagctgaccctgtgcagtgaaaatctgagggctgagttcctattggaacacaagtgaaagacttcctggcttctaatctcaggataaggactcagagctccatctgttccagccttaggataagaaccagaatcttacaccatgaaagcatgaaaggtaagatttgagtgaggaaaaaaaaaaaaaaagtctgtgtttcagattcagttcacaaagcagtttcatacttaaggtaccatcacaataaccctgtggggtaagcaaggcaaatttcattcttgttttatgggcataggaagtaagtctcagggaggttaagaccaaggtttctggagaattttatattatgaatcttgatttatgggattactattatgtaattcctaagatcatataggaatcctagagcttgaatatagaactttatttttaaatctatatacatcataattacaaggagtagtgtccatttgggttccttggccctgatgtgttagtggaataaacatttttgtcagggttgccatgtgtgtctgtgcacgtgtgcactgtacacctccaggggatgtaccctaaaccacatgaatgtgatttgcacatccaagatttacagtgtactatagggagaatcttttgcaacagcttttgctataatacagaatctgagatgtctttgagaaagaaaagtgtaatcattaccaaaaaattattctcataatgtgtgcaaatttgtatgaaatctatattggccatgggacaaggaggtatttccagctagcttctgaaagggctctattctctcataagaattcagctgttgacattaggtgatatctgcccaggtcatcagatgccatagagaaagagggtttgctgaaacttatatcagcagtgcactgtatgctctttctgatttatttgaacattcatttattgagtgtcaagtaatgcactagatactccagggatctgacacaaactctgccctgaaggagcatgtaatctcactggggagaaaacaaaacatatgataatttcaaaataacaaactaggcaaactagttaacacttaaaaagcaggctttattcaaatgcaaaattgcatgttacagggtaacctttcagtaagaagccaggaagaggagctcatcatgggttggattagtaaaggactagttataaaagaagtggtggggttgagggaggcctgagatgaaatttaaagaatatgtagaatctaggtaagtggataaaaggtctgggggcaggggaaaggagagcatttcattgtgaatcaaggaatttctccacctgttttaactcttccatatgacatcaaagagatgtcacttgcagctagcatttcagtgatgttttcttactaataatatcgtgataaaagaaacattgactataagaaataggaatgggtctcataaaaggaaacagcaaaacccccaaactaaaaaacagcgcaggctatttctctcttctctccttttgcttggcactcatgagatgctaggtgtggaagtcagccaactgaaaaagagaggtggctgaagaaggtggggaggctgaagccagttaaataggatggtccaattcacagacggcgaggctacagtgcaaataggactctttcaacttgagcaggaccccattacttcactggagttagaaagaaaggagagcgtagactttttgaactttctataagagtgtacctccacagtatacagaagacgacgtgaaatttgatctgcaagaaaactgagtccatattcacatatgtatcaaatttgcacttcatttagaagtgtctgtcatcaagtacagcactgaattgaaactgaaaacaagagtcaagaaagagcaaagtcagccatctttatattccacatgaatcctttccctttatggtcttatttgtttctcctcagaaaagacaaaaagctgagctgtataaacacctgtgggctgggggttgagggataaatgaggggcgaaatggaagctgaaggaactgttggtcaggtagaaatcttcccagatgcactgaaggaaacacacttcatgtttgacgtaggaggtgccaccacacaaaacgtttcatggaaggatttaaaggatctcatgatttttagtattccaagaattttctttcaccaagggcgatttaatatgggtcattcatactgaaagaaaaacaaaagataataagagtttaaaaattgcaaaacttggagtgttagtagtaaaggtaaatattcattagagatgagaagaggagcaaggaaatgctttcagctggaaatctcagacaagaggccaggctttaggaacctctgaagatgaacaaatgtaagcaaaccctagtagcagcacttctcagattttcatgtgcttaccactcagagatggtgttaaaatgcagactctgattcagtaggtctgagtggagcctgagattctgcacccctaacaagctctttagtgatgcttatgccactggcgcacagaccccacttggagaaatttttgtggtgcatacggtctttgtctccagatctaatgagtctgaaggacagtgtagattgattttttaaatttatgtttattttaatttaatttaatttaatttatttatttatttatttttgagatggagtctcactctgttgcccagtccggagtgcagtggcacggaggcagctcatgcaaccacggcctcctgggttcaagcgattcttccgcctcaacttcctgagtagctgggaatacaggcacgtgccagcacacccagctaatttttgtatttttagtagagatggggtttcaccacattggccaagctaatctcaaactcctgacctcatgatccacctgccacggcctccgaaagtgctgggattacaggcgtgagccaccgagcccagctgtagattgattttgagcagtggaaagtcaaggaattagaaggcatgcttaaatggaaagtgaaattggagaaaatttaaactcatgaaatagtggtggttataaactcgtgataaattatatcctgggatataatttaatgagatggtaacacatttagtttaaagaaataagtgacactttttttgtgtgacacaactgtcttattcttggaaaggacaaggagagaatgaaatatggtatgtcttcacagcacctttcaaagggagaaccagattctgaggagctggtctcatgatgaactgtcagggtaaaccacagttcagcagctgcaaatgtgcttgccaaaatagagacaaaaaaatgtttctgaaaacaaaatttcacatatgccctcctctgaggttggcatcatatcttcctgtgtatcttgggtgtagcttctatcctgccagaatttagacagtagaaaccaaatgaggtgataaacagagtcattttgcagaagagtcaaaataacccagcaagaaatgaaaccacaaatgcccaaggagtcattcattcaccattcaaaagctaatagaaatgaacacaaactactatgaaaattcacccaagaacttaaaaaaaaaaaaaaaggctcatggtgtttagtgtgatagtattcattttacctttgacttgttctaaaaacacaccatacttctaccccacccttcctcagtgccgtcacacaatggtttcagtgtgaaaaaaaaaaccacgttactggaaaaggagggtgcctgggacttgccactctaagctggtagtcaagggtcttgagttctaaaagcatacgcgttaagagcatgattcctggatccaaatgagtatggatctcagcattgccatttattgtgacctcaggctattttatttctctgtgcctgtttctttatcagtaatgaagatgttcatagacccttctcccacagacttaaaggcatatttcatgatttaagacatgtaaaccattcataacagtatacaacatggaattaatatttgataaaggtttatgattattgtaactaactctgtcacttgctcaaggcctatagaaaacttacttaattagttcaactacaaaaagagtttgaatgtgatatccaccaagatcatattcagacctagaattctgtgattcttatgaattaatacagccttggtcaataaatgagagctgggcaaataattcttctttgctaggcctttctagaccatctggtgaagcattcaagacttatgttattggggccagccttcctttccaacttcaactccacaactcctcaataagccatgggctcaagaaagttctgctcagtggcccctgaaaaatgctttcatagtctcactaccataccactgcttacacaatttccttcctacagactgccttcctttcctgcttttctccatatacctaaatcctatctattcttcataagcaaccttctttataacattttctataaccaccaagccaaatgaccttttccttcttaaatatagcacccattggccattaccatgctctgccttgtatttttctgatttttttctttctatattcctgtcttaactccccagctaggtaataattttcctgaaatcagggaccaggctgactcctcttgctgtctcaagaaagcttagcagtttccaacacaaaaatgttcaataaacaactattaattgactgattataaaaaatcagtgaaccattaaacttaatatagcaatttgcttagcatggtaattagctttttgctaatattcttccagccagtctctcctcctgtgcctcaaggacatcttaaaaaaaaaaaatctagttgatctgcttccatctagtggcaattaaaacaggtggttccggtagccagaaaacagctctgggtagattgtgccagaaaatactttcactcagtaggtgcgagtttgaaagaaatcttcacatctgtgggtttcctgccacagacatagggagaccagcccagagaaagaagcctttcctcactagactccatttgcactagtaaagagaagacagagtaattaaaaagaataaaaagaacctccactgatcgtacatcctcatccagttacccctgccccacttctccttcacagccaaacattttaaaagagatgactgcttgttctgtctctactttctcatcctcagtaatgctcaatgcttggccgtctgacctctgtcttgatgtctgcactgcaaatagtctccccactgacacccttgttgcatccaggggatacttactggttctcttggcaatgtttgaaaccgttcccctttctttgtttccttggcattcattaccccacactctttctcctcttccttctccctgcctggcaacatcttttcatttctctttcccttaggtgacttattagataatgatgttcctctggctcccatactctctcccaggtcctcttccattcttaaagcactcacaccctccctggatgatagtacccactcctgagatggcagttacctcctgaaatgtgagggacccaaatccacttctcctgccatagcctctgtgctttggataggtccaatgagccacagtgaatgatgtgcatacacccaaagctcagtacaaaactgaacccatgatctttacctccaaaacctctcattcttttatgttcccttctcagaagtaaacaggactaccatccgccagtttccaggtgagaaagatgataatttgattcttctctctcacttttagccaattaacagacacattcagttaatatcacctcctcttatttcatgaacccattcttactactagttccctagacaggcgccatcggttttaatctaataactgcaaatgcctccaaaacaagtctctttgaatccaggctcacctgtctcccacacttgccatactgctctgcagggtgaccttataagatgccagaggtaaggctactcactgtttaaacccctttagtgatatcccaaaagacctcaagataaagcccatatcacatggcttatacattagtttatgatctggcttctggtgcctcatttttccccactttttcctttgcattctaagcaatggcccatactaagtttgtgattggtaggatggttgcccaaaccagcatccaatcccttcagaaatcatctcacttcatttctagcattttaaaggaagctcagttgtccagctgggtactgaatatgtcaccaaagtcctcctttcatagtttattttacttaaactctccttcctaaaattccagagcaagtcactaaaccctagatactgagaaatatttttccatcttcatttctgccaggtgggccatcaactttcacatgtctgcatctcctcccactgtgctatttctccagtagaagaaatttgagcttcaagaccaaactgaaaaatacttgcctccttggggaagctgtaggtagaattcatgctccctatctttcccacatttctgaaggacaatgcctgttagagcaattgaatgcaaatagtcaattgaataagcatttattcatttctcaataagtgcttgttcaattgaatatttcttaaataatatatttaagaacaagaagaacacaccacaatgtttttaaccctcagaaaaaattctgaggtaatcagaaaaatctccctttacataaactgcccttttctaatagggattacttgttcgttcattcattcattcagctccactagcaccaaaaagcacagctctgaaaggaagctagtagatttatcaccttatctggtcatttggatgaggaccccaggtaaataaactactatggggttaatgtgtctagctagagcaggaagtaacttaaggaagtagagaatgaatcagcagatgtggaaactcctcgccactaataaaacttaccttctcttggatttcttgcctgaaaatagaaaatagagaaaaggcattagcaaaaattagacaatttaaagtttttcaagtaagggagaaggaagactcccactctcaaaactgtcttttgaagtatattaggtatttgttaggtggaccctatctgtgtcaaaggagatttgaggaactggcttaataaacagtggtagacactaatacagaacagacatgttgatgcagatgcctcctgaggttccattccattctccgtgctactcaagaagacagaattgctaaattgcctggtggcaagacccaatatgtccattcaagtgtttatcccttcccaatctgccatctcatcctacctgcagattcttcccttgagggacagctgctaatactgtaaaactatgtgccattacagctcacagcatcatctctatgagaatccacaagagaatttcactttggtcttgttggtaggaattgtgcagcctcatctgagtaactaatgtgtttttatcttacaaacacaaggaatatcacatggttctcctttgactggctgtaaggaaactcagagctagatctgagaccctctcctaccaagtatataaaactttgtgacatacatttttgtgccataacttcaaccttggttccaaatgatttttgtaccctaagtttaaatttggctttcttttttttttttttgtactcaataaaacatcaagctcatttattattgcgaagagcgaaacaacaaagcttccacagcgtggaaggggacccgagtgggttgcccaaattggcttctttttcttactttttaattaattttaatttgctatactgaacacattttgtactgttctcacattctttttgaaaaaagcagaatataaataagtagataacttaaaaaaaactctttgagcagaaagaatcatttgggaggcaatatatttcagtggctgtaaagtggcattctagaatcatcctacccaggtgaaagccctattttgccacctgtagtgtagtgtgtatttgaacagctactttcttttctaaactacaatttcttcatctgttaaagaggcataataattgtatcatcctcattgggttgataaaataaaatatttccaagtatttagttcaggtcctagcacgtagacagtgttgcattactgttttaatcctttaaagtattaaagactactatttgaaatcttttcttctaaaattcagcctgctgatgaccaagtgcacttgagcagggggaatcaaatctgaattaatttcagattctggttagcttcacataaatattttttttagggatgatgaacctaacagcaatagatgagtaagaatctgttcctactgagagagtttcattttgaagaaaaaggaactaagggggcatgtgttcagtttcatgccctggtctaaccctgtgtgttggttctggtgggaaattcttccaaccgaggaaaaaaccagttcacaaatctgaagaccagtgattttagaagatgtatctggactggagtctaatctctgactctgggtcctgctgatatggtatttttgagatttggcctaaaacatcattgccctggtttccttatttaccaaacagggccaatggtagtgactaatcagaaaatgataatgcctggtgcacaaaatgtgtctagatgagcccatgcacaaggacacatgtttctggaactgttccttattcctttcctaaaagaaaggagggaaagtctccatactaagactactagggcaggggacaaagtgctagagtcagaagattcatctgaggacagaagaataggggtgaaggctctagtcacttcattggctaccatgctctaaatagttacctgtgccctttttctaactattagaacccaaaaagcctataaattctctctctctctctctctctctctgtgtatatatatacatatacacacacacatagacacacacacacacctaaacacacacatagagatttatgactttttacttttatccttgtaaatgccattaactatattttgtcttagatttagcctgggaatgtagccattatttctaccattgcctccataggaaaaatactcttcatgttttaaaggaccaacctacaactaaaatctttggaaagcagaatcatttgtaagttggtgaaaatggaagatgttgttttataaatgaagactttttttttttttttttttgagacagggcctcactctgttgtggagtgcagtggtgctgtcatggcttactgcagccttgacctcctgggttcaagtgatcctcccacctcagtctcctgggtagctgggactacatgtgcatgctaccatgcctgactaattttttgtatttttgtagagatgtggtttcgccatgttgcccaggctggtcttgaactcgtgggctcaagtaatcctcctgcctcagcctccaaaagtgctgggattagaggtgacagccaaggtgcctggcccacagatgaagactatttaatgttatcttaaagataccctaagcttcctaccaagccagtgatcttttggggcttctgttttctttgttggcataactgtaactagcctaactgcccgttatctgtttcctgtttgccccacactgattcccacagcagttttcaagttatcggtttgagatcttgtacagaaatgactccaaggtaaaaaatttaaaaacaacccctctaatttttttacccttgcttataaaacagccttagccagctaacccctcactacatgcaaatgagtttgattctattcttttgattctacaaacacttattaaaagattttagaattcggaaataaatagcttccttattaaggtgacttacagccccaaagtccttaaaattatttagacaatagccaccttatcccagggggcagtgtgtaataacccaccctgttctctatccgtcagttctgccatcatcgcccaaggtaggaagaaagacaggacaaccggggtcaagatttgaagtctcaatggaaagaataatcagtggttggagaaaactgtcattcttcttttgccttaatgcagtacttgatacttatacttagtactgtatagtacttagtactgtataatactataagatagtgagattcaatcagcacagaatttctaatagcaagggcagagacattttaactgctcagtgctctcaggttatacatagctaatgaagttcttgcatatcaacaatccccacccccctcacacactttgtctttctggattggttagaaaacttacctagcgcccactattctcaaatttaaatgaaagataagatcagagtggcacgcaattagggactgataaataatatttttgtaattgccagtgtaaatggacagggggcaacctttacataccatattcagtgaacagaatacgtactaactaatttgatggaaggaaaattaaaatgacaatcaactgagcccacagaaaggcaacacagagcagttggttagcaattgtttcgagatcatccctgaacttgaaacaggtatatcttttttttttttttttttgagacagagtctcactctgtcaccaggctggagtgcaatggtgcggtctcagctcactgcaacctccgcctcccgggttcaagtgattcttctgtctcagcctcccgagtagctgggattacaggtgcccgccaccacgcctggctaatttttgtatttttagtagagacagggtttcaccatgttggccaggctggtcttgaactgctgagctcatgatccgcccgcctcggcctcccaaagtgctgggattacaggcatgagccaccacacctggccaaaacaggtatatcttaaaagctgcccaatgtccatgaatgttacagccttgaatggttcttccaggtgagtttggccaaatgtggcaccatacacccaaggcctgctgcaggctagtgggttgctcacactttaaagctgagacacactcatgccttaaggtaaagggagtgataatctgggcagcagatgttaacttctcaaggcagtcctccttctcttttcctctccagtgacggatggttggaaagcatatatggtgcatttggttagagctgtggccttggtgaatagatacttgggagaatacatgggaatttctcccagggttaatgcaatgcccatgtgttgggaaccaggtgactcttgaagaggtcaggtatttgggagcagtgccttgaaaccttagtggacattagacccacttcctagtggaattgtagcattgaaatccaaggcatgtaggctcttagaggacagagatagtgtgtcattttttcagaattaattaagagcaggccaggcgtggtggctcacacctgtaatccaagccctttgggaggccaaggcaggcagatcacgaggtcaggagatcgagaccactctggctaacacagtgaaaccccgtgtctactaaaaatacaaaaaattagctgggcatggtggcacgctcctgtagtcccagctacttgggaggctgaggtgggagaatagcttgaacccagaaggcggaggttgcagtgagctgaaattgcaccactgcactctagcctggtgacagagtgaggctctgtctcaaaaaaaaaaaagtattaaagaattacataagagcaaagaaccattagaatatctcacttagttgttatcagcctagcaagctgccttgaaggtaatagacatttttaaaagtttatcagatgaaaagcgaaaatcagccaacctgttttaatgaaggtgtgtcctgggctgatttacatgtctccagggactgatggctctagaatgtaaagcttggcatcctgcttgtgttgaatctatcacatttaatttcctgtgggtttcttttttttttctttttcactttaaagttgtgttcttttcatgtgaagttaaactcacatacctttttttaatctccttgccagccaaatgataaatgccaacccagagaatgcagtaaccatgactgccactggaatgaagagggggttataatcaccctccttaatcattgagaaacttttgtccaattctgaaagagaaatcagtaaggcacatagcatgagaccaccagcattatttccttagtctatctcatgatatttgacttttttcctccttacatctcccagtagtagcccatttgatgccatttgacagatgaggaaactggcatgggaaggcccctgatgagtctacagcataggcaaagactggaccagccttgctagtctaatgcctacagaatctcaatgcccagatttgtggttcatagagttcctgaaaatgcacctaaaaatgttggcaagaatggtcatcgttgtatttagctccatggacttgttcaatgactggaactctgaaacacagagaagagctaaaagcctaatacaacttcaggaaaaataaaagccaatgatctgaactggataattcaccagtcaaaggaaatcattaatgcttttactttaaagcagttgtgcaaaaataagcacttgatttttacatgccaaggacctgcactaatttctttccaatgcagtagttaccacttccctctacttccttcacgaataagtaaaagggcatgtttagagatactcttgtaagtgtaaactaagttcatttgggagcctctatttgaaaatactggtataaaaaaaaatctgtctcctgatactaacatttgaaggaatctacttttttacatattggcagagggtctgattctatccttagttcttcccattactttgatgaaccttttcaaggtgatttgatccccacacccaaatatatgattgagagaaggctcaagttcccaggagctccagacagaaggtacctgttggcttgatgaagatgaggaggaaatgaacactagctaggccttaaagggaaatgtctctgataggcctaatacacagtcctctgctaaaggcctccctgcctctctctgctcatccactctactccctggccctgggcacgcagcacacagagatcagcatttctgacagcttctgtagatcctaccatttaaagacttttgtcatccatgcagatagtctcaggagcagacacaggtagctattctttcacatgctagcttaacatgcatttgctttagcacctattgccaggcactgtgtcaggtggagggtatacaaagatgaacaagacatgattcttctcatatacagatagattttggaggcattagcttagtgatgattcaggagtatccattatttggggaagtaggtggtcattagtgaccttttacaggcatttcaatgggctaacagagatgttagattgtagtggaatagaagaatgggtaaaaagtaaatcagtgagttcagattttaggagttaagatggcaagaggtgagaacaaaaaaaggaaatgattgtcattaaaggaggaggaaagaccagccaaagattttacagtgagttaagcatacaaatttatttctaggccacatattcttagcaaaacaacatgtaaatgtttatgtatgtctttcctcatatctgctcatccatcagctccatcgttaagatttcagttttccaggacaaacttactcactttgacatattggactaggatttgaccagattccagatgattcacaaatggttttcttcttcccaattaactcagttccttctgagcagatgaaggtacatgcagaggtaaagctgaagctggccaggggatggctacagttcatgatccccaaatctggtgctgatagaggctcacactgaatcacttcaatgaaaaagaaaaaaaaaaaaaagacaaaacagtatttctgagtagagaccctcccttgagcaaaggatttttagccaaagctgcctgactacattacttgtgatattgcttccaggctttattttcttgagaatgatggtgggtggtgaatgagagatgaaggcaaggaagcattgaaagctgtggggagaggagtagctactccaggctgctgccctagctaaggtgaccctccccttctgctggaagtaccatgccatatggcctctgcatcaagggctcttatgggatattctcagagaatctctgccgtttcatctgttctgatatctacccaagcattttgaaaaacatcccaattcactgaagcaagtccaacttccgtaaattccagtaggtgggttgacagttttataatttcaataagggattttgatagcacttctaagaattaaactacttaaactaatgcatcaggagcatacttgtagaaaagttaaccaaaacttcgtaagttcagatgacattggttttctcccatatggagataaggttggcagttaaaaatgaaaaaaaaaaaaaaacctaccttatttcaaacttgaaaagatcaagagattgtgtttttgtttttcagttgttattctcctaaaagtttatgcatgaggaaaagtaaaagtgattttaagaataagccaaataaaacaaccaagaaagacctccactaccctgggaaggaaactggttggtattaagtaggacaccacataaaacaggtgttattgagaggagaagaaccaaaatgtaactgaggttcaacaagacattatttatgcaatggcaatgagaaaaataaaaaacacagtataaccatgctgtattgctataagtcatgttacacactgggagatggcttcaggggtatttggtttttactttttgtttgggaggtttttcaaaaaaatttagttagaataagtcctttgagaaacatcacagtaggttaaacaaagttaggttaaattaggctcctaagtttgacttctcagcaaacttctactgaatgttctgactgtaagcccaggattgcatgacaaaacctctagtctgaagttactcaccttgacaggttggttctggagatgaccagtttccaaatggtccacaggtggtttcttcaatcccagttaagtttgttccttcagagcagctgaaggcacactgtgagctgaagctgaagtttcccaaagggtgagtacagtccatggtacccagctctggggcctccaaaggctcacactgaatcacttcaatagggaaagaaacagtatggggaagagttaagaggaactgacgcctggatttgaatcctagccctgccacttgataaccatgtgcctttaaacaaggttacttgaaccctccaacttcagtttcttcatctatataagaggaataatgaaattgtgttatctttatcaaattgatatggaaactaaatgtaattcaattagcataagtcaaggaccttagaacaaagcctgactcatcagaaattctaagtaaacattagctagtcttcatattattatcttcagcattatctgtagtgagaatccttaaagccaaataggtgtaactgggaatgaccagcttagtcgggaaataactatcacatcagagcccctgagtctactagagtattgggagcaagatgttcagagaaagagtgggtctccataataagccttctttgcaaggagagaatataaaagtctaggaagcattttgacctcaattctgtcttctattctagctcagttccagaattttaactcttttgattttgacaaccctctccagaaactgtatctatttccctgttctgattggtggtacaataggtaaatttaagacttggaaatcaaagttttcacattttagaccctgccatgccatttagtaaacagtacaactttcatgtcttattcctcatctgtcaaatttaagccattattgctaccttgctctagagacttcaaggaagaatggactcaaggaatcagaagaatttttgtatttggaaactatatgagatgagattagggagaaacatgggaactaagagaaaatgttatcttttttcattgatttaaagagtatctattatatatcaagcattactctggggcttgaagagcttagatttcaccctgtaggacaaaatggtaggtagaaattaatgggtggattgtcatgtatgtgtgatgtgttttaattgcttttaattgatcagtctccctgtagtatgaataatgtatttgaggggagctaatttaaaattgtggaactcatctaataaactattgcaagaatctagaagaaagataatgacggcaatggtagtagagttgacaagtggaagacaaattagaaaaacactaagttgtaaaaattggtagaatgttaccctgcataaatgttgggggagttaagagagtctcataccagggtgcccatgtaaatggtgattccacatactgagataagaaatacgaagagaaaagctgactgggaacaattggttttatagtcttttaaacatcccaaaggacatccttagcatatttgagttcagagctggagataggcttatcagtccaaagatcacatagatttgtgagtccgcaaaagtcagtaagtttgaccaaaggatacatgtagattagagtcagaagagcaatatacaaaagacaaaagctgagaaattatagtagtttatggtcctggataagtgctcatgaaggatctcaggagaaatgatcacaggtagaaagaatgagaaaagagtgatatgagagaaaccaagacaaagaaaagtaaaatgttaaaaatgagtgaaataggcataccaataattaaaaatgagtaaaataggcataccaataacataagggttaaaaaatagagttcaaaaatggggtgagggtaaagtattaggaaggagtcatggcccagggatcaagtgaaatgagttagatctatagatctatttcagttggttgacatttaaatgtattttggttttaattctttattgtttacaaacattgcttttttaaaaaattaaattgtccaattcaattcaggctcacaagcaagtgcctcatatatacaggcattttgtggatcccaaagatgcaatgataaataggacacttactgatctcaagaagttttcagtaccagaggagacggacaagtgaacagatgacttcaacataagtgggagaaatgaggaagaaatatgtggagctatcagaactaagaaagcttcctagaagaaactgtctttgaacaatgtcttaaagatgacatgttttttggccatgtgcaaaatgagagagaaggccaccagcaaagtcagtgtgctacagagcacatgtgttaagtgtggagaactgcaagaaggaaaggaactactagaaggaaaaagcaagatactttctgggtaactcagcctcctaatgataaatggcatagtttcttccagaccttagagttctaattaatctaacaagctcattagatcgtgagcttcttgagagcgggaatctaccatgctaattccttatggtaaccctgacagcttttatcccaacactgtgcttcttgtggtactcaaaaagacttgttgagaagtgagtcgaaacttcatgctgacttatgaaatctttacggaaaggtaacaatattgtgaaagcagagctttctgatcaaaacttcccatttctcagagtggctagtatcattttgttccaaccagcttcatgataagctataatgattcctgtgactttacctaagaagaagcaaagaaaggaaagagacttaccaaactgacactggggcccatagtaccccacatcacagttgcaggtgtaattattgatgatttctacacattctccatggccactgcatgaccagggctggcaagaagctttaaggaggtcagaaaaaaaatattttaatgtgattacattttagtactcaaagtcatttctttagacatagataaccttttgtctgagatgatttaaataatcaggaaaggtttatttgtaaattcatagcataaaaatcatatgctaaaatttttacgtataaaatacactaagcatatagtcataggcatttatttgcttttggaatgaaattaccaatactaatattctgtaacacttataggaaacttagtggcataccttgaaactcttgaaattacttgtttttaatgagtgagaaggttaaatgatgacctgacctcaatcatttctgcatgcaattatttcttggcaatccctttctttatagaaatcaaagattaaaaagtccaaatttgctaaaacggtagagtccaatttataagagaccaaattaactatggttcattattaaaacatcacttggaaaatgctggctgttttggaattgtagaagattttacagaaatattcatacaccaaagatagtgcaatttttatataaaattatataaggttagaccaagaaggaagcacgcagcaccacactctctacttcacaatgtgaaaactgaggtgatgtgagcctaagtttccaactggccccagctgtcagcttctcctcccctgccttattatcaaaggcactgattgtctagctcttcctctgtacttcctacgtagatctatcattttgatgtaacttgatttaggggtatagcttttgtgcacagggacaaatcttacacaccaaaaattcttaggagtgacacgatgcaagattatatagagggctagatgtattttagaatgaaccagaagctgttctcatccccccacctttccatggggtaaatctgagtattctcttaaccgtggcccttcctgagtctgaggcagcatagccgtcttgtcactccctacctgtgtaacagagggctgcctttagtttgtggcaggcgtcatcgttccatttgcctgcatctttgtttctcttgatatagatctccacgcagtcctccttgttcttcttgttgttgggctcaccatctccccagttctctgcttcttcagtaagagatttgttggttcccacccacgtccatattcctcctatcttccggattcctatccagtagtaagaacgactgaaaggcagagtcttctccagatactcaatttccgccttgttttgtatggcaactaaatctgtgtaattgtctcggcagaatcttctagccctttgccagttcatgggtttttcagaataatggtaagtccagcagtcggttccatgatgtgccaggaaatctgcaagacatcagtgtgacctatgcagacttacataatgttacagctaaaaagaacctagcactactccaggctgagctagacacttagagatgaggaaacagagcctaagagtgtatgtgaccatctcaggatcacagaatagttgtttgcagatttgaagtagaacctagaccttctggcttgaatataagatgcttttatctaaggttctatttgaaacaaatttagtggttttctaggtttattttcttattaatttttttctcaaaattatttcaggtgaaatttaaccaacatattttagacattcatatttctttttctttgtagctgttaatgatttacaactaattaccgtgtaatatcatataactatacaatttacgtatactttttaatcctggaatcatttcttgaaggccaacacatatgtacctatgggagaagcataataaggacaggaagaacagtgacatacttttaagtaacctcttttacataaaaaacattttattttaccataggaagaactgcttctggaaaagcccaatataccactcaactcttatatatctaactgtataatttttaaaaagaacaatttacaaagccaaatggtataggattatgaaattcattagatcatgttctatacacaaagagactcaactgatgatgtttaataaacatatggacccatcaaatatgagggctttgaagatatctaattaaacacataattacacaatgacttcataataatatatggcattctaagcatggtatgatctacatgaatcactatttaatacagtaaagaaacagatataattgatggtaaagagcatcataaaataaacattttgaacagagttttgaatgagcattccactagaatgcaagttctaagagggaaaaaactgttgtgtccactgctgtatccttagtgcctagcataaatttcacacattgtagggactcagaaaatacctgttgtatgaaaagagcactaagtttctatgtgacacagtgcagacatggcataaggaatgtgtgaacgggagagttagcatgtttgcttggctagagctgaaaatccaggctagggagaaagaagacattagtttacttaggaaatgaaaaaccaagttcaaagctattgctggagagtcttcaagaatcagatataaaatttgtcacaacaatgggagaaggaccaaaaaatgataaacccccgtcccttaataagctcgtattgtaattgtagaaatgacattaatgtacactgaactatgaataaaaaatagaaaatgaggtgctaaatatttggtacagattgtaagtaccttaacagagatttcttaattaacattattcctttataattgagggattttgtggggttattgggatttgaactctacagcatgggctattataggttaaaaatagtgttcaggagtttctggggaagaactaaaggtaagaagaaaagagatgtttacagaagggatagaattaacagctctgtgaaataattttcccttagactatgtataactagtggatatttaagaaaaatgaatataagtaaaatagacttagcgatatataaatatcataacataccacaacagagcattgtccacccccacaacttgaagatgttccataagtccctctgggtgctctgacatttccatggaaatatctgcaaatgaaatacaaaattatatttagatgtatactcttaaaccacacatttatagcctttgaggtggtgcttacaactttcttaataatcagaataaaacacatatgtctactaaccctgtctgaggtaacaggtttctcagacatagatgaaaaattacttcaaatttacatcagaactgatgcacagttttgttttgttctattttatttttacgctttagtctcaagttgctaatcggtactgccctgaattttttctatggtttggtaatttttatacctgcttttctgctgagctattagataaaactatttaatatttactatgtatattttttaaagtattgttgctgcttaattaactattgatgcttatatttaatgttatagcctcactcttgatcataatgggtcaatgcctcaaatacctaaaaaaaaaaaaaattagatagccagacaccaggaaagaaaagtatttctttttttaataaaaagaaatacctttttgagcaactgaaatgacaaagtcacaaatttcctgcacaccttaaaatatacttaatgtaaatgacgagttaatgggtgcagcacaccaacatggcacatgtatacatgtgtgacaaacctgtatgttgtgcacatgtaccctagaacttaaagtataattttaaaaaaattctatcttccaaagcatatcacttctcaggtagacacagtgtttattgcaaaagatctgatttcaatagtatttcttcaagagtctccccagagacaaagtcaagaagaggaaatcagcatatctgagaagaaagatttcaggatcactttttttgagggtctgagaaaatgtttagtttctatattatttaaaaccagaattgaaatggggtgattcctatccttgccacctgcctctacaaccccaagagtttctatctgagcatctaaacgtcttttaggctgaaaggctcaccatggctttgcttggtccttctctagttcttctgcagcccattgagcctcttgacttagcacaagggtctcaggtccttgcccaaagggagtgtgctgtgctgcaggtagactgcactgaatgtcaacagaaagccttgctttctttcatttctctaacccagtctcacatcctcctcctcctccccttttccctccccttcctcctgcacttctctttcctctttccccacccctttcctagactggcctctattgcctcccactgagacaaaaatgaactgctgatcagaaagtaatgtgactagattctctcttccttccctcctttctatccttccttccattctcctatgcatctttccttaccctcctcctccttcactcattgttgttgctgttcttcttcctcttctttttcctcctgctcctcttcttctacttgttcttgttcttgtttttgtttggttcttgttctcctcttcctccttctctctctcctcctcctccttcttttccaccaccctcccctatctttttcataaatgctaaactaactcttggctacctgtggtaaatggcccttggaaattgcaaatactacaaatcaaaactgcatttcagacatatttatgatgtttgcaaaacttcagtagagctaagcagtggacttgactcgtttcggttccttcacctccgtctttccttgctcaccacctagtggacgtccttgttagtggcacttcctgaagttaacccctgaagagagcccatgctctctagcttttcaccgtgtaggtttgggagcctacaagtacctttaatattcttggactataaaatgagatggttttataagactgcatgtgaaattaggacccatatgatgaaggacaataaaaaggaagacccactgatgtgagtcaatgagtcaaatgcaaatcagatttgcatttttaggaaaataataataacaacaacaaaaactctgaagctcagcgccccatatttattatattgtttaatctttataacagctctctgctatagatatgattattatccccattctaaagagtctcaaagaggttaagaaacaaattcaaaaactagcgaaagacaagaaataactaagatcagagcagaaccataggaggtagagacacgaaaaagccttcaaaaaatcaataaatccaggagctgcattttgaaaagattaacaaaatagatggaccactagctagactaataagaaagaagaatcaatagacacaataaaaaatggtaaaggggatattaccactgatcccgtagaaatacaaactaccatcagagattactataaacatctttacacaaataaactagaaaatctagaagaaatggataaattcctggacacatacaccctcccaagactaaaccaggaagaagtcaaatccctgaatagactaataacaagttctgaaattaaggcagcaattaatagcctaccaactaaaaaaagcccaggaccagatggattcacagccaaattctaccagaggtacaaagaggtgctggtaccattccttctgaaactattccagagaatagaaaaagaggaactcctccctcactcattttatgaggccagcatcatcctgatactaaaacctggcagagacacaacaaaaaaagaaaatttcaggccaatatccctgatgaacatcattgcgaaaatactcaataaaatacggcaaactgaatccagcagcacatcaaaaagcttatcaaccacaatcaagttggcttcatccctggaatgcaaggctggttcaacatacacaaatcaataaacagaatccattacgtaaacagaaccaatcacaaaaaccacgtgattatctcaatagatgcagaaaaggccttggataaaattcaacaccccttcatgctaaaaactctcaataaactaggtattgatggaacgtatctcaaaataataagagctatttatgacaaacccacagccaatagcatactgaatgggcaaaaactgaaagcgttccctttaaaaactggcacaagacaagtatgcctctctcaccactcctgttcaacatagtattggaagttctggccagggcaatcaggcaagagaaagaaataaagtgtattcaaatagaagagaggaagtcaaattgtgtctgtttgcagatgacatgattgtatatttagaaaatcccattgtctcagcccaaaatctccttaaactgatcagcaacttcagcaaagtctcaggttacaaaatcaatgtgaaaaaatcacaagaattcctatacagcaataatagacaaacagagagccaaatcatgagtgaactcccattcacgattgctacaaagagaataaaatacctaggaatccaacttacaaggaatgtgaaggacctattcaaggagaactacaaaccactgctcaaggaaataagagaggacacaaatgaatggaaaaacattccatgctcatgggtaggaagaatcaatatcatgaaaatgaccatactgcccaaggtaatttatagattcagtgctatccccatcaagctactactgacttttttcacagaattagaaaaaaactactttaaatttcatatggaaccaaaaaagagcttgtatagccaagacaatcctaagcaaaaagaacaaagctggaggcatcatgctacctgacttcaaactatactacaaggctatagtaaccaaaacagcatggtgctggtacaaaaacagatatatggaccaacggaacagaacagaggcatcagaaataacaccacacatctacaaccatctgatctttgacaaagctgacaaaaagaagcaattgggaaaggattccccatttaataaatgatgttgggaaaactggctagccatatgcagaaaactgaaactggatcccttccttacaccttatataaaaattaactcaagatggattaaagacttaaatggaagacctaaaaccataaaaattctaggagaaaacctaggcaataccattcaggacgtaggtatgggcaaagacttcatgactaaaacaccaaaagcaacagcaacaaaagccaaaattgacaaatgggatctaattaaactaaagagcttctgcacagtagaaaaaaaaaaactatcatcaaagtgaacaggaaacctacagaatgggagaaaatttttgcaatctattcacctgacaaagggctaatatccaaaatctacaagaaacttaaacaaatttacaagaaaaaacaaacaacaccatcaaaaagtgagtgaaggatatgaacagatgcttctcaaaagaagaagtttatgcagtcaacaaacatatgaaaaaaagctcatcatcactggtcattagagaaatgcaaatcaaaaccacaatgagatgccatctcatgccagttagaatggcgattattaaaaagtcaggaaacaacagatgctggagaggatgtggagaaataagaatgctttttacagtgttggtggaagtgtaaattagttcaatcattgtggaagacaatgtggcgatttctcaaggatctataactagaaaaaccatttgacccagcaatcccattactgggtatatacccaaaggattataaatcattctacgataaagacacatgcacacttatgtttattgaggcactattcacaacagcaaagagttggaaccaacccaaatgcccaccaatgataaactggataaagatgatgtggcacatatacatcatggaatactatacagccataaaaaaggatgagttcatgtcctttgcagggacatggatgaagctggaaaccgtcattctcagcaaactaacactggaacagaaaaccaaacattacccattctcactcataagtgggagttgaacaatgagaacacatggacacagggaggggaacatcacacactggggcatgtcaggggatgtggggctaggggaggaacagcattaggagaaatacctaatgtagatgacaggttgatgaatgcagcaaaccaccatggcacatgtatacctatgtaacaaacctgcacgttctgctcatgtatcccagaaattaaagtataatttaaaaaaagtttaaaaaaagaaagttgccttagtcacataactagtaagagacatggttgggaatttgaacagaggccaatcagttccaaatccatgctcttgatcattaagctgaacttatggcaggaacttggaagacatggtaaaatggggaaaaacgtggagccagggagacttgtgaaagtgccagtgctcccactataccctgaaagaagtatctagacttacttttttctaagtcctctcctctaattctctcaatctctctctctctttctctaagagatgggaatgctgctctgtcactcaggctagagtgcagtggtgcgatcatagctcattgcactcaaggaatcctagggtctagtgccccttctccctcagcctcccatgtagctaagactacaggcacatgccccaaccctcgactaatttttttattttttatttttgtagagacaggatctcactatgttgctcaggctgtaattctgtcttgaagcttgtccaatcaggctttcagccacaccaattccctgagactgctctcaccaaggtcctacacttcactaacacaaacagcctattctccatcctcatcttacttcaccagggagctcctggttttcctcctacttcactggctatttcttctgtatcatgtgttgattctccctcatctccccaacctccaaacccttggagtactccagagatcaccgctttgctcttctgtgtctaacctcactaacttggtggtccaattcacactcttgactttgaataccatttaaatgcgaacgaattctaaattctgtacaaccagaaccattctcctgtagccaaatgcctactcaacatctccatccccaaacaaatttagttgttcaataagcctctcatattttacatatcccaaactgaacttctgaatttctcctccaatctgtagggctcttcccacagcctttccatctcagtggattataactccatccttccagttactcagaccaaaacttttggagttaactgagacacctctcttttttttcacaagtcatatccaatgtgtcaacaaattttggtagtggaaatattgcgggattttttaagaaatcagagagaccgatggggttcaggaggatatttattatttaggtgcactggccaagtcagattaacatccaaaggactgagccctgaacaaagagttaagttaccttttaagcattttgtggggtgggagagaggggtatctgtgcagggggaagcatactacagaagtgagaaataaagacagttattcaattaattgagacatgcattacatcatttcttacttttcaagaagaaacatgttttgcgacttgagtttatctgtctagtgaccttgcagctgcacagctagagaaacagggtcttcacaatgcctgggaaaggaggagaggtaagtctcactagccacagaaaaacaggcagttaatttttaaagggctccagctctttctctttctcagggggagttgggttttgttacatacaactgagtttccgcttacacattatttaatttcttttaattcctgttccaaaagaagccagatacaaaaggttacatgttgtctgattccatttatatgaaacatatagaagaggtaaatccatagagacagaaagtagattagaggttcccaggggctgaggaagaaatggggactaactgcttatagggtacagagttttcttctgataaaaatattttggaactagatagacattttgttaggccattcttgcattgttataaagaattacctgagacttggtaatttataaagaaaagatgtttaattggcttacacttctgcaagctttacaggaagcatggtgccgatatctgctcagcttctggtaaggcctcaggaagcttacaatcatggcagaaggtgaaaggggagcaggcatatcacatagcaaaagcaggagcaagagagggatgtggggaggtgacagtcacttttaaacagccagatcttgtgagaactcattcactatcatgaagacagtaccaagaggatggtactaaatcattcatgagaaaccccaccctcatgatcaaatcacctcccaccaggccccacctccaacactggggattacaatttgacatgagatttgagtgagaacacggatccaaaccatatcagagatggtggttatacaatgcgataaacgtcactggattgtacactttaagatggttgttttatgttgtgtgaacttcacctcaataaaaaaaaatatttaatgtacattcagccaaaagaagatttggaataggaaaggtcatggagatatattaacagccatttgatgggtggtaaggaaaagagtggttattagactgttttgtggccctcaaaaggtagaactagatcgagttggtgagcattataaaaccatcacaaaaccctggagagaggacccagtgctgaagaaccgtttgcctgccatgagacatgagggaagtaccagtgaatgccattgaaagcagcatccctgggtccaagggatggtcaaaggaccactacccaacccttccctagcctacgcctccattacagatgaccgcaagatttatttgctcattgctgccaaccaaggctgcactcactgcagttgctatcagtttatcatgggtaaaaggaatgtgcagtagagaactaactaactgcccacctacctccacaatcctatcaggacaaatcaccatggctcacatttccttacatttggcatgtaagcccctcttactgtctgtcatctatctcctacacagttcacctaaactgttctctcctgacccaaccttgattttcatcccaaatgcttccttgccatctctgggattcctgtcttcaccatcaccaaactcccctcaatcttccagtttcctgttcaaacttttctcctacctccttgctttgtcattagcccgactgcctccctaggacatcacttcccctgcagatctctcaagatgacaatatttattctccacacagcacatacttcagggttggaaggcaggggcaatcttctcctttataatgagtgcctcttatatatgtttattcatctgccctcttgtaaaacacacacacacacacacacaaagaagaaataaaataactctgcttctttgaagcttgtgacactgagataaaccatctcactgtcctcattgtagtgacctctcaactcctcatgcaagattggctttggcacctagttcctgatcttcctttccctgtaagcacttctcatagtcttacgggacttcaccatccatggcacaaccaataccacagcccagatcctcagctctccaatgacattttcctccactagacttgagctacctccttccctaggcacagcctcaacctcgacaacacctaagactgtaccgtctctaaagtcacatgttcaaacacttcactctttaaccactgtctcctattcttgcaagtgtattgctcaagtatctcattgcaatgctttttacttctacctcattgaacctccaggccattaaacatttccttatttctaaccatcaggtttctccttacttgtttgtttgtttatttgtttcttttttttttttttttttgagacagggtctcactctgttgcccaggctggagtgcagtggtatgatctcggctcactgcagcctccatctccctggttcaagtgattctcatgtctcagcctcccgagtagctgggactacaggtgcatgccactacgcctggctaagattttgtatttttattagagaaggggttttgccatgttggccaagctggtctcgaactcctaacctcaggtgatccacctgcctcagcctcccaaagtgctgagattataggcatgagccactatgccccacctggtttctccttatttatttcaagtctatgctgcactattaaaactgccttgacaaaaattataatagtgagaaaattatgacagtgaaagagatctgaaataatcaacccccatcttgcctttaccttccagactgcccttaataattcctgagcttgggccaagctatctttggcagaaatttagtttatagtttaaatgataatagcccttctccaaaactaaactgcctttgtaaaactaataaaagaccaccaatgaaaggttaggaggatgagaggagcctgaattctgctaaggtgtagatgtaaacaattaccaactgttattccggaggtcacaagatttgcaacatcgccaattactcctgcagataacagcactatcatagaatctgattggccttttgagatgtcttttcagattcttacatttcaactggtggctctacctggacccatcaacaagtcctgtggctccacccagaagcagacttaacatgcacaaggaccattttccacaccgctatgattgcatcccaaccaatcagcagcaaccattcctctgcctgccaaattatccttgaaaaatcttagccttagaattttgggggaggctgatttcagtaataacaaaaccccggtctcccatttggctggctctgcatgaattaaattctttctctattgcagttcccatcttgataaatcacctttatctgggcagcaaacaaaaggaacccattggacagttacactgttggcagatatatcttgcttccaaaattggatttttgtttaatgaatttattctgttttcttgatatttacaactgtgaatgttgtgtctgaattctctttatttcttgttgaaaagaactatattgctacagccagtacatacagatggatagctaattactcaacacggggggatgtgaccatcaccgcactgtgcaaatgaatgttacccattgtccacttttcccaaactacatagtgttatatggtatatgacccaatcaacggtggcaaagctccagaaataccacatagacatcagggacactttaaactaatcagcctatagtcctttttcagtaatttccaaacctggttgtgcatccaaatcacttggtaacattaaaaaaacaaaaaaatatacacgcaacattcgctcccaatcctactgaatcagaatattttgggttggttcaggaacattcaggagtttttcagggtccaaggtttatataatttgaggtctctctttgagaaaaggaacgtaaaagcgtcttgcttttatagatcttacaaagatgtattaccatgtaaacacattcctaggacccaggcccttgtaatttaaaggtttatctaagtaatgggccctgaagcttaattttcattatcttcagggcaaattacctgtgggttagggtttaggaatatatctctctgtgtatgtgtgtgcacattagcatgtacgcttgtgtggattttttttttttttttttttttttctgagacagagtctcgctctgtcgccaggctggagtgcagtggcgtgatctctgctcactgcaaactccgcctcccaggctcaagcgattcttctgcctcagcctcttgagtagctgggactataggcacgcaccactatgcccagctaatttttgtatttttagtagagttggggtttcgccatgttggccaggatggtcttgatctcttgacctcgtgatccacccgcctccacctcccaaagtgctgggattacaggcgtgagtcaccatgcccagcacttgtgtggatgttttaagctcccaggtgagtgaatacaaaactagatctttcccttctgtagcatctgtactgtttactctatgcatctcaatattttttcttttagtatctttcctttttctctcttattacttcctcttgtgctatttttacacctccttttttaaaaaattttttcccttttatttctattgacctttagccctcacaatgattcctacaagccccatttctgtaaatggggattgaaataattgctggacttttgagagatagatatattaaattgcaaactggcagtagtg

SEQ ID NO: 359 - DNA, 60001 bp, Homo sapiens
ttctcttggtctgcacgggagaaggtggggatcacagctggagggggaagacaaggggtgagatggaaaatgggtgcctcttgggaagagacagcttgtttagctatctgatctgcgaagttgtttccccagctttcaaaagatgggtgttcgggggcctaggacatggacaattgcaatttcttctggcagctgaagattttcattcattcatttattgagacgaagtctcactctgttgcccaggctggagtgcagtggcacgatctcggctcactgcaacctccgcctcccaggttcaagcaattctccagcctcagcctcccaagtagatgggattacaggcgcccaacacaacacccggctaatttttgtatttttgtagagatggggtttcaccatgttggccaggctggtcttgaactccggacctcaggtgatctgcccgcctcggcctcccaaagtgctgggattacaggtgcaagccaccatgcccggctcagcagctgaagattttctagtgcttgcataattaattccttgtggaccagatcttggcccttactatttacgaggtcttgttgagtccagatttttcaaaggtaaggactactccaaaggcatacttggagtcggtgtaaatagttccttcctgattctgcagggattttaaggcttggtttaatgcaaagagttcgcatgtttgggcagaccaggcatttggcagtcttcctgactctacctctgtgaggtctccccaacaactaaggagtacccgttgtgcctttttccttcaatgacccgggaggagctgtctataaattggtgaccccctgtttggaaggcggtttcgtttagatccagtctgactctagtttgataactgattagacccaagcagagatagagtcatcaaggttcttggtgtgttgaacaaagaactgaacaaaatgcacaaagtaagaaagaacaaagaaagaacaaacgaaagacaaagcaacaaaagacccggaaagcacagctttattgaaaacaattcacagggtgggagtggctggagcaaacggctcaagagcttcctcaattagggtttttattaagctaaaggaacctggcaacaccccttgctgccctttagaggcctccgattggctgccatctgtctgctgctatctgtcaccaaaatgtgtcttattttagcaagaagtggagcataatctatttaaccaattgcctcctgctggactttgagaatatttttctattttttaaaaaaattgtttttgttttgttttgctttttttgagacagggtctggtctattgcccagtctgcactgcagtggtgcaatcatagctcgctgcagcctccaactcctgggttcaagcaattctcctacctcagccttccaagttgctgggattacaaggcacatgccaccatgcctgactaatttttctgatttttagtagagacaggggggtctcactatgttgtccaggctggtcttgaactcctggccttaagtgatcttcccacctcacgcctgtcagccatcgtgctcagttgttagaggttttataaaaatgaaaaatgtcacatactgtttttccagaaacttcattggcactagtaaggttctagggagttggcaaacactgattggtgaatgactgcagtgggtaaagcttagatgagtgatggtggcagatgaagctgtgactagtgagtgatggtggcgggtgaagctctgattggtgagtgatggtggtgagcaaagctctaccagatgagtgatggcagcgggttgtgggggaaagaaagagcgatcagacagttactgtgtctatgtagaaagaagtagacataagagactccattttgttctgtactaagagatattcttctgccttgagatgctgttaatctgtaaccctagccccaaccctgtgctcacagagacatgtgctgtgttgactcaaggtttaatggatttagggctgtgcaggatgtgctttgttaaaaaagtgcttgaaggcagcgtgcttggtaaaagtcatcaccattctctaatctcgagtacccagagacacaatacattgcagaaggccaggccgcagggacctctgcctaggaaagccaggtattgtccaaggtttctccccatgtgacagcctgagatacggcctcgagggaagggaaagacctgatcgtcccccagcccgacacccataaagggtctgtgctgaggaggattagtaaaagaggaaggcctctttgcagttgagataagaggaaggcatctgtctcctgctcgtccctgggaatggaatgtcttggtgtaaaacccgatcatacgctctaaatactgagatagcagaaaacctccctatggctggaggtgagacatgctggcggcaatactgctccttaatgcactcagatgtttgtgtaaagtcaagcataaatctggcctacgtgcacatccaggcacagcacctttccttaaacctatttacgacacagagatctttgctcatatgttttcctgctgaccctctccccaccattactctatagtcctgccacatcaccctgtccgagatggtagagatagtgaccaataaatactgaggaaactcagagaccagtgccagtgcgggtcttccatatgctgagcaccaatcccctgggcccacttttctttctctatactttgactctgtgtcttatttcttttctcagtctctcatcccacctgacgagaaacacccacaggttgtggagcagctggccaccccttcagcaggtgaagctctgactggtgagtgatggcggtgggtgaagctctgattggtgagtgatggcagcggggtgaagctctgattgttgagtgatggcagcgggtgaagctctgactggtgagtgatagcagtgggtgaagctctgactggtaagtgatgatggcgggtaaagctctgattggtgagcgacgatggcaggtaaagctctgattggtgagcgatgtggtgggtgaagctctgataggtgaatcatgacagtggttaaagctctgactggtgagtgacagcagcaggtaaagctctggtggatgatggcgggtgaagctctgactggtgagtgatggtggtgggtgaagctggtcttagtgtccctgcaggttgtttcagcagccatgagataaaactggcctcctccaactggctaaaccttatgaaggattggcctgctaccaatcagaggctgaagtggagacttggcccatgatcattcagaggctgaagtggaaacatctgtcatgttatcacaagagtgaagatgtggcttgtatgctgcctagaacttggtaggcaagtggttgaatctcagtctctcgggcttaccgcccctcagtggggccaggcacggtggctcagcccataatccaagcactttgggaggctgaggcgggcggatcacgaggtcaggagatcgaggccatcctggctaacatggtgaagccccgtctctcctaaaaatacaaaaaattagccaggcctggtggcgggcgcctgtagtcccagctactggggaggcagaggcaggagaatggcgtgagcctgggaggcggagcttgcagtgagccgagatcacgccactgcactccagcctgggcgacagagtcagaatccgtctcaaaaaaaaataaaagaaagaaagaaaggaaaaaagaaaaagaaaggctcagggggtagaggaggaggccagataggagagttgtgtggagcccagataaggatcatgtttatattgacacctctgggcagtgagcctggcacctgtaaatgcctgtaaatcgccagggagcagaggacagtgctggctgggagcctgtgtctcagccctgccccgtcgaatgatgtggcctgtggccaggaatatcacctcagtctttcaatttcctcatctgcaaaatggggatagcaatgctggccattccttctcccagatcagtgatgtggtccgaaagtcctaaacagtgtcactaagtaaggtgaagtctaataagtcataaatcccagcctgccatagggacctaagagctattccctttctccttccctgtggaatctgggacacagcaaggagcaggaccaggtagcagcaggcttcatgctccttccccagcagccttcagagaggacaccagggttacccagggatggttacctggtccccagatcaccttgttgtggcaagtaccagaattgggcactggccagtgatgggctcataatagctccagccaaatgcccctctttcctttgtccttacagggaaggtgggttacacttatcctcctggagccataattccttttttttttttggagacagattctcactctgtcacccagactggagtgaagtggtgcaatcttggctcactgcaacctctgcctcccaggttcaagcaattctcctgcctcagcctctgtagtagctgggattacaggtgtgcaccaccacacccagctaattttttgtatttttagtagagacggggtttcaccatgttggccaggctggtctcaaatgcctgacctcaggtgatccacccaccttggcctcccaaagtgctgggattacaggcgtgagccaccgcacccagcccggagccataattccattaggccttaccctgcagtgcctgggcacctgccctagtgccctatgtgattacgagcataggtaactacttcttctttcttcttcttcttcttttctttttttttgagacagggtctcaacctgtcacccaagatggagtgcagtggcatgatcttggctcactgcagtctcaattgcctgggttcaagtgatcctcccatatcagcctctgcagtagctgggaccacaggcgtgcaccaccatgcctggatgacttttacattcttttgtagggatggggtttcaccatgttgcccaggctgctcttgaactcctgggctcaagcagtcttcccacctcagcttcccaaagtgctgggattacaggggtgggcgactagccaagcctaggttaacttcttatactgcaaagttacagagtgtggcaagaaaaaaataaagctctccatcgagttcagggatgagtcatttcaggaaataccattagttttcaagacaatgcaatttatataatattgtaattccaagctcatcaatgtagttcagatattctcacagtcatggcagactaaatctaacttaaaaggaagcacatgctatagaggtctcacaaggacctcactaggaccagttctgatactgtcccagtctattgtgttgccttcacagaatgcttgagacttagtaatttataaacaaaagatgtttggttcacagttctgcaagctgtacgagaagcatggcacccccatctgcagggcttctggttaggcctcagactgcttccactcaaggcggaaggcaaaagggagctagtaaggagtgtaattcccagttttaaaagtaaagatttgaaagcattagtttggagacttgtagcccacaaaaatttaggattttgtccaaactgccgaaaaactcaagaacagcgaacaacaggtatactatagcttttcttttgaagcataatttttctctcttcagtctccatttttattaaaaacaaatcatgatagaatgatttgtttacaaaataaactttagtcttattatacttggcctgattatttgcacaaagcacaccaagaataactatttttcacataggcctttaaaattggctttgatggaactctgttctgtaaggaatctcaaataagacttttttaaagctaagcccagccatgggtttgtacactcaaatacctatgagttgggtaaatttctctcctcctgaggtcccaagaaaacttgggtctcctgagactgttagaaagtgacattctttacttaccacaggtcaggaactttgaacagggactgtgtagacaaggtataaggccagatttcccaaggggcttttattagctcaataactcaactttgattctccttttttttttttctgagacagagtttcactcttgttccccaggctagagtgcaatggcacgatctcagctcactgtgacctctatctcccgggttcaagtgattctcctgcctcagcctccagagttgctgggattacaggcgcctgtcaccatgcccagctaatttttggaattttttttctttttagtagagatggggtttcaccatgttagccaggctggcctcaaactcctgacctcaggtgatccgcctgcctcagcctcccaaagtgctgggattacaggcatgagccacctcgcccagccaactttgattctttaaagaaagcatgccattctagtcaaagccttgataaaataaccagtttctcccattgtgtcctgttacaaaagaaaacagattatcattgtacttatgcaaataactatactgccatatgttgagaatattcacaaatagtttccaaattctggaaaaatcaggtagggagaaacaaatatactccaaattttttcacaggagtatattttattcaactgttaaaagctgtaagtagcttaaaagaaaagttttcttggctctggaaaacaaaaaggatcagcaatgttttaagcaaaaaagttaatacaaaagattactgggctaggctcaatggctcacacctgtaatcccagtactttgggaggccaaagtgggtggatcaccttaggccaggagttcgagaccagcctggccaacatggtgaaaccccatctctactaaaaatacaaacattagatgggcatggtggtgagtacctgtaatcccagctacttgggaggccgaggcaggagaatcacttcaacccgagaggcagaggttgcagtgagccgagatgatgtcacaacagtccagcctgggagacaagagcgaaactccatttcaaaagaaaaaaaaaaaaagattacttcagttttctattagttcaatcaattccattaactcctgttctgtttgatatttatgaacatttcagctccccatgagagtcctggaagttatttcctctattctaatgtcacattctccaaagttattggaaacctgaattcaagagcacctgtcaaagttctagagctgattataaaccaccttttgaagagcatcaaacaagacaacaattgtctgtggatgacaacaattgtctgtggatgacaacaaatcttaggacggccattattaaagccacagttgactaggaatttggttacttctgtggcatacaacaattttacatacaaattataactattatattaacagcatacattcaatcatatcagaattataggagtttctcataattttggaacacatactaataacatatttatacaaatacagcccaaagaaagccaaacaacatttcatatttgacaatgcttcctgtatgatttttataccacgtaagccagatgtcatttttggacattagaggacctaatatctaaaagattaggttagaaagagacataattataatcaaattataatttataatttgattttggaaagtttgtcaaatatcaaagatttattttgtggatatcacaaaatagaatcccaggtcaccataagtcattcatttgaccaaaatgataactccaaaattttaaaaagaaaaaccctttactctgatagaggagacatagctttccaaacaagaagacccaatgaagatagcatgaggccaactgaatcgtatcttctctctcctcccctttttccctgtagtttacccaaaggggcaaacaaaaccctttcattttcttttactataaaaaatcttttacataatcttttatgtaaaaaatcttttacataaaaatctttttcaaaagagaaaaccaaatttaatgtttgtattagtgcatttttaatgctaaggctggttttacaataaaaatttacaaatgtattcagttttaattagtctgaccataaggtaagattttcataaacttttttgaacactttataatttttcattaaacagtcgatcagttttctaagaaaaccctgttatttggacacctgggctcagattctggccctgtatttgtgtgcttttattttaatgttcaacctacagaaaaaaaaattaaataatccccttccaatattagccaacttgctcatacccacagaacttttttttacaagaccaacccttcataagcccttttcactttgtttaaacctccagttttgtcccattactcttttaggttaagataatctttaaaccctctgaactagacaaaattatattccttttttgttttgttttgtttttgatatggagtcttgctctgtcaccaggctggagtgcagtggtgcaatcttggctcactgcaacttccatatcccagattcaagcaattctcctgccttagcctcctgagtagctgggactacaggcatgtgccatcgcatccagctaatttttgtatttttagtagagacagggtttcaccatttggccaggatggtctcgatctcttgaccttgtgatccacctgcctcagcctcccaaagtgctgggattacaagcgtgagccaccgcgtctggcaacattccctttaataaaagccatattcccatgccttcctataatcttttactttccttacacaccttacatgtagaactgtttctccagtggtctcaattacatgttacaatgttacctcttagcagcttttatttttggtgaaaacctgataagtgattttaattatgtactaggtgtggagtctaggacatcagacagaagtgaagataaggcctaactctttccaaagtaggcaaattaaacaattttcaaaagtcaaagaaacagcttacaaccttaaaacatttagtaaatctgatatctgacgttaatttagaccaaatgtctacattttgaagacatttttgtttttatcaataatttctaaaactgtctttatttccaaaagattattaaagtcacgtgtacaaaaggcattaaagtttctctttttctgacaaaatatttgatttcggcatctatttttaagccaattaaacagagctctttttgtgtaaatattacacacacaacacatatgaatacagacagatagaagattcagcacttgtaagattttttatttaccagtttcttaattggattactggcttcagggtggaggaacagggccaggaaaccatgcagtttctggggcctaataaggaggcacagctggaaaggagagacagatcccccaaattagggtgccattctatatgtatcctggatccctaaaaaggaaagaaatactacaagagaagacagtgcagtgcttccaccacacatgtcatcgcaaggaaaaccaaagccaatcagcccattttgtaaccagccaatcccccatgggagtctcatctctcagtgggggttggggatgtttccgtatcttccaggtggccaagagcatgtttctctgatccaagcttgcaaagagctaagtatgtcttcataactgacattagccaattcttaaagtatattttttacctagttattatatatcaagccctcctataattcaaagtaatttttgatacccccaagactcaaaaccgttagatagcacaatgcaaaacagaacagacttagattttgagggggacctatctgcttttaattcctggggtttcatgaggaaaacagggttttttcccaaaatggggtctatagcacctcctctgtttttcccaaggaatctcaggctaccagaagttatcttagggcctctcatgtgtgcattaatagtggtaagacaaaatggagaaaaataattcagtcgactaaaagaaaaaaaaaacctttttccagcaaaacaagatccatgaaaagaaaagcataaagaccttttaaatatacctacagcttgcttatgcacttttaattaagttgacttttaaccatagtggtctttaaaaaaatcctttcacatctctgattacctgactttatccatgcagtcaatatttctggcttttgaactttaccaaaagtaaccaacctcccaggtgcttcaaaggcatggtaagcagtttcttttttactagatttagaatctccctaaggtagttcagagaaagaaaaattcaagagaagaaatcagaagctatccataaaaacctcaaatggcaaagttacacacataacaaaccagaaaggaatcattccagaagccaagaactgaacccaggccaccactgtcaaaagataaacccttagttaccgaactatacagcattgagcagtttctattgcttttcccaaaaggagcctagagaggccaattttgagtttgagaaggcttttaactgctcaagataattcttagggctgtgacatgaacctcaaaattcctgtcctctggatggcagaaaccaagataaagtatccccacaaggttaagctcttaaggacacaaaacaagaccgatcttaccgagtattgttttcagggacccgtagcatagtttgtaattgaccagtctgctgggttggcttgaaaaatgggcttatagggatcctaaacccacattgtatcctgtgatactcctttctccattacagaatatagaaagacaaacttttagtacaaagtacaccagatttgctacagcctaagaccagtctcacaaatccatttttctattaatcaaactcttgcagaggagacaaatatagtgacatttaccatttatgcagacagagaaagagagaccagaaacttggctggtaagaatttcttatccttttttggcataccagatttatgggttccctttctctgcagcttccagaagaatggagcaccttctgatgaccctgctcgctgtgccatagctgtgggattcaagccactttacaaaagaaaatcacccttttctgttttatggaaccataggcaaaagataatcaatttgcaagatgttgcccaatgggctgcattggggaactgaatgaacattttccatcccagcaaaatacacaaaacaaaacagacactagtcaccccattcagcacccaatatcaacctagcaaagctcaaactttctccagacggtccctgttgtctttgatccattccagctggggagggatgacctccaaatgataattcacagtggggtctctgggcaaggcaaagagccaatagtcaccccgagaaaggcctatcgagctttcttcagggctcaccaaatgtgaccagacaaataaggaggattctccaagttaggcctgctggacttccatcagcaatttcttctgagatcccctccacatatacaaacacacacaaagacacgacagacagaaggccttccaaatcagatccccaacaaagaactcaagagtatccctcccaaactatcttcctattctctgtctgagaaatctccccaaaatcttctggactgagaagaagtctccccaaccaagattcttcctactagttagggagagccaacagagaccccctaggagccaaactgagacagacaccccgcaatggggctacagacaaacagacaccccaccagggggctacagaaccagtcgggagaaggaaggggtcattggcggtacctagaatgctcatcaacccagacccccacaatgggatgcagacagacaccccaccatggagctacagacagacaccctgtgatagtgctacagttaagggatatcgccccaggactatttctccattgcaattaaatccatgcacattgggttggcagcaccccgccagtagagagtaccaaagtcagcccctagtccaagagaactaggcagatgcttgggctagcctctggatccatcgctagagaggggctaccaaaccacgggcaggtagctgcaagggcaatcctgatgagcctcgaaatttgtaaccacccagtgggttcactttgcccactgcctagacagagtggatttatcaagacaggggaattgtaatagagaaagagtaatttacacagagctggctgtgtgggagactggagttttgttattgatcaaattagtctcctggagcatttgaggatcagagtttttaaggacaacttggtgagtcaggggaagccagtgagccaggagtgctgattggttaggcaagagataaaatcatgggacgatgaagctgtcctcttgaactgactgttcctgggtgggcgccacaagatcagatgaagcaattttatcgatctgggtggtaccaactgatccataaggtacagggtctgcaaaatatctcaagcactgatcttaagaacaatttagggagggtcagaatcttgtagcctccaactacacgactcctaaaccagaatttctaatcttgtggctaatttgttagtcctacaaacacagtctagtccccaaacaagaaagaagtttcttttgggaaagggctattattgtctttgttttaaactgtaaactataaactaatttcctcccaaagttagttcaacctatgcccaagaaggaacaaggacaacttaaagattgaaaccaaaatagagtcagttcgtttaagtctttttcactgtctcaatcataattttgcaaaggggatttcaggatcaactcaaacagaacaccaccaagacacattatataatcaaatttttgaaaggcaaagtcaaagacaatcctgagagctgcctgagagctgttacttgtcagtataagtgatcctcaatcagattaacagccaatttcccatcaaaaacaatggggttcagaaggtagtgggataacatatttaaagtgctgaaattattttttttaactatcaaccaagaatcctacattcagaaaagctagccttcataaatgaaggataaattaagacattcataaataaacagaagccaactgagttcattgctggccaatctgtcctataaggaatgttaaaggaaatcctttggactgaaatggagaataacaaacagtaggtctaagccatagaagaaaataaagaacgcaggttaaataaatataaaagccagtattgttgtacttctagtttgtaaatccttttttttttttttttttttaagatggagtcttgctctgtcaccaggctggagtgcagtggcgtgatctcggctcactgcaacctccacctcccaggttcaagtgattcccctgcctcagcttcccaagtagctgggactacaggcgtgtgccagcacgcccggctagttttttctgttttgatagagacggggtttcaccatgttggccaggatggtctcaatctcctgaccttctgatccacccgcctcagcctcccaaagtgctgggattacaagtgtgagccactgtgctgtgaatcctctttttaaaataggatttaaaagacaaatgccaccaggcgtggtggctcacgcctataatcccagcactttggcaggctggggcaggcagattacttgaggtcaggagttcaagaccagcctggccaacatgctgaaaccccatctctactaaaaatacacaaataagccaggcgtggtggcaggtgcctgtaatcccagctacttgggaggctgaggcaggagaatcacttgaacctgggaatcggaggtgacagtgagccaagattgtgccaccacactccagcctgagtgacagagcaagactccatcttaaaaaaaaaaaaaagacaaataactaaaacaataatcataaatctatgttgctgggcacagaatgtaaaaagatgtaatatgtgacactaacaatgtaaagagggaaggacagagaagtacaatagtagaacttttgtacactattgaaactaagttggtataaatttaaaataggttgttataaatttgttaattgtaatccctgtggttactactaagaaaataaaatattcagaaagtaaatgaaaagggaaacaaaatggcacactaccaaaagaccacttaaacaccaaagaatgcagcaatgggggaatagaagggaaaaccaaatacctaacgcacgcggggcttaaaacgtaggtgatggattgataggtgcagcaaaccaccatggcacatacatacctacttaacaaacctgcacattctgcacatgtatcccagaacttaaagtaaaataaaataacaggtataaggcattaaaaaaaaataagaaaatggcagaagtccttccttattagtaattactttaaatgtaagctgattaaacacttcaattaggccgggcactgtggctcatgcctgtaatcccagcactttgggaggctgaggcgggcggatcacgaggtcaggagatcgagaccatcctggctaacatggtgaaaccccgtctctactaaaaaatataaaaaattagccaggcgtggtggcgggcgcctgtagtcccagctactcgggaggctgaggcaggagaatggcctgaacccgagagacggagcttgcagtgagcagagatcgcgccaccacattccagcctgggcgacagagcaagactccgtatcaaaaacaaacaaacaaaaaaaaccaaaacacaaacagcaacaacaaaaaacacttcaattaaaagacagagattggcagaatggattattttattttattttattatttgagacggagtttttctctgttgcccaggctggggtgcaatggcgcagtctcggctcactgcagtctctgcctcccagattcaagtgattctcctgcctcagcctcctgagtagctgggattacaggcacccaccaccatggccagctaatttttgtatttttagtagaaacgaggtttcaccatgctggacgggctggtctcaaactccggacctcaggtgatccacccgcttcagcctcccaaaatgctaggattagaggcgtgagccaccacacccagccttttttttttttgagatggagtctcgctctgtcgcccaggctggagtgtagtggcgcgatctcggctcactgcaacctccccccctcccgggttcacgccattctccggcctcagcctcccgagtagctgggactacaggctcaacgctaccacgcccggttaattttttgtatttttagtagagatggagtttcaccgtgttagccaggatgatctcgatctttttctttttttttttttttgagacggagtctcgctctgtcgcccaggctggagtgtaatggcaccatctcagctcactgccatctctgcctcccgggttcaagccagtctcctgcctcagcctcctgagtaactgggattacaggtgtgcaccaccactcctggcatttttgtagagatggggtttctccatgttggccaggctggtctcaaactcctgacttcaagtaatccacccgcctcagcctcccaaatgctgggattacaggcgtgagccactgtgcccagcctagaatggattgtttaaataatacattgatatactgtctacaaaaaacttactttagatccacacacaaaccattgaaagagaacagaaaaacatatttcacacaagtagtaaccaaaagatagctgaggtggttatatcaatatcaagcaaaataaactttaagccaaaaattgttacaggagatcaaagaagacattatatattgataaagtttcaatccaccgagaagatataataattataaacatatacacacctaacaatggagtcccaaaatatataaattgaaaattgacagaaaggtggagaaatagttctacaaaacagtaggaaacttaaatatccgactttcaataaggcataaagcaaatccattaaagaagttttattgaaaaaaaaagatcaattaggaagtagaggactcgaacaactctataaaccaaccagatgtaacaaacatatatacaacacccagtcaaataataataaggctgagtgtggcagcttatacctgtaatccaagcactttgggaggctgaggtgagaggatagcttgagcccagaagttcaagaccagcctgggcaaggtagtgagactctgtctctacaaaaatttttaaaaattagcctggggtagtagtgcatgcctgtaatcccaactactttggagagtgaagttggaggatcatttgagcccaggagtttggggctgcagtgactatgattgtgccactgcactccagcctggaggagagagtgagaccccgtctcaaataataataatacagcagacattcttcttaagcacacgtggaccattctttctccaacacaaaccatatgtaaatcaacaagatatgtctcaataaattttaaaagattgaaattctacaaagtattttctctaccacaatggaatgaatccagaagtcaataaaagaagaaaaactggaatattcacaaatatgtggaaattaaacaatatactgtcttaaacaacaagtgggtcaaagaggaaatcacaagagaaattataaaatactttgagacaggctgggagcagtggctcatgtctgaaattccagcactttgggaggccaaggcatgtggatcacttgaggccaggagttcgagaccagcctaggcaacacagtgaaaacccttctctactaaaaatataaaaattaacggggcatggtggtgcatgcctttaatcccacctactcaggaggctgaggtaggagaattgcttgaagccaggaggtggaggttgcagtgagcagagatcgcgccactgcactacagcctgggcaacagagcaagactctgtttcaaaaaaaaaagaaagaaagaaagaaaagaaaagaaaaaagaaaaaaatgctctaagacaaatggaagtaaaaacacaacatatcaaaatttatggaatgcagcaaaagcagtgttcagaggaaaatttatacctataaacacctatacttttaaaaaaaacaaagatcacaagtcaatatatatataaggagctgaatatataaagaactctcacgattcaacaagaagataacccaattttaaaatgagcaaaaaggacaggcatggtggctctcacctgcaataccagtgctttgggaggctgagatgggcggatcacttgaggccaggagttcaagagcagcctgaccaacatgacaaaaccccatctctactaaaatacaaaaattagttgggcgtggtggcatgtgcctggaatcccagctactcgggagtctgaggctggagaattgcttgaacctgggaggcagaggttgcagtcagccgaggtcacgccactgtactccagcctgggcaacagaatgaaactctgtctcaaaaataaataagtaaataaataaataaaaataaaatgggcagaagggacaggcgcagtggctcacatctgaaatcctagtgctttaggaggctgagtcaggaggatcattggaggccaggaattcaagaccagcccggccaccatggtgaacccccatctctactaaaaataaaaataaaaacgtaagtagaggaatttaaatggcagaaaaattaaaattaaagtaaaaatgctttaaaagcaacagtgatcttaaacgaaatttactaatttctatgtgactatttcatttataaaattagtaaatttcatttaaattaagatcacttttaaattaggatcatttcataaatgaaataatatctatcttccttccatgatgaagtaatggggatcagatttactgttctgttttaaacagccatcaaaaaaacccatcaaagtgtatggaacaatgattcccagaccttaaacaacagatggcaccccatctcctaggagagcaacccctaggagacgacaaaccaaccaggtgaggtttatgattgtcccatcttcctgtctggagagtttttggacaatggagcaggaagggagaacccaaaagagcctggcagtccctgagttgaggagacaagttgagaattcaaggaggccaaagctaaagaaagaagaaccataggggagagaggttccccaggagggtggggggctggggagtgggggaggctctgcaattcttctctcaagccttcacctgagtattgatcgctctgtgcatttgagaaaaacactgaaggtctgttggacaggtgggtagatgaaaaagaaaaaaaaaatactgaaagccagggaaaggaccacaagacaagagcaggaagaacaacaccagagcttccatagggctggaaatagttctgccagccagcctagaaacatctcacagtatctgggtaatcagaaagaagggtagagcctcagttgtggttccaaattagccttaggacagctgctctagccctgcccaacaacgctggagatcaagcctggaaagaatcaaactattccgggaggtggggggcagcccccgcctggccagccgccccgtctgggaggtggggggcacctctgcccggctgccccatctgggaagtgaggagcccccctgcccggccaccaccccgtctgggaggtgtacccaacagcttattgagaacgggccgtgatgatgatggcggttttgtcaatagaaaggggggaagtgtggggaaaagaaagagagatcggattgttactgtgtctgtgtggaaagaagtagacataggagactccattttgttctgtactaagaaaaattcttctgccttgggatcctgttgatctgtgaccttacccccaaccccgtgctctctgaaacatgtgctgtgtccactaagggttaaatggattaagggcagtgcaagatgtgctttgttaaacagatgcttgaaggcagcatactcgttaagagtcatcaccactccctaatctcaagtacccagggacacaaacactgtggaaggtggcagggctctctgcctaggaaaaccagagacccttgttcagatgtttatctgctgaccttccctccactattgtcctatgaccctgccaaatccccctctctgagaaacacccaagaatgatcaataaatactaaaaaaaaaaaaaaaaaagaaactattggcaggtaacttcattgcacgcagaacaagaatatttaaagaaaggggaaaatatccagcaaggttaaattcacaatgcctggcatccaatccaaaattactaggtgtggctgggcacggtggctcaggcctgtaatcacaacactttgggaggccaaggtgggcagatcacttgagctcaggagttcaagaccaacctgggcaacatggtgaaaccacatctctactaaatatacaaaaatacaaaaaaaaaatagaaaattactaggtgaaaaagaagcaggaaaataaggctcctaatgagcgtaaaaatcaactagtggccagatgtggtggaaaaatacagaaattagttgggcatggtggcaggcacctgtaattccggctactccggaggctgagacaggagaatcgcttgaacccaggagggggaggttgcagtgagccaagattgcgctattgcactccagcctgggtgggaccagagcaagactctgtctcaaaaaaaaacgaaaaggaattatggctccgggacaggtgtaacccaccttccctgtaaggacaaaggaaaggggcattttactggagctaccatgaggccatcaccggccagcgcccaattctggcacttgccacaacaaggtgatttggggaccaggtaaccatcccctggtaaccccagtgtcctctatgcaggctgctggggaaggagcatgaagcctggtgctgcctggtcctgctccttgctgtgtcccagcttccacagggaaggagaaggggaacagctcttaggtccctatggcaggctgggatttttgacttattagacttcaccttacttagtgacactgtttaggacttttggaccacatcagtgatccgggagaaggcatgaccagcattgttatccccattttgcagatgaggaaattgagggaccgttggtgatattcctggccacaggccacatcattcgacggggcagggctgagacacaggctcccagccagcactgtcctctgctccctggtgatttgcaggcatttacaggtgccaggctcactgcccaggtgtgtgaatataaacatgacccttatctgggctccacacaactctcctacctggcctccagcctctacccactgacactgaacctttcaatcggccatcagcctgagacacagattcaaccattcgcccccaaactgggagtgcttctgggtccccagcttcctgtgggcaatgtacatggagagcagaagacatattttggtgacagatgtcagcaagaacacctcatttctagaagtagcagtggccaataggagatagaccacaggaagaaaagatgagaaaatatggagagtttttcacctggtgagacttggtgggaggtaggagctgcctccaagtctagacactgacgatgctctacccttcccctcccaacctctccaggctcagcgaatcacacccctctctggcctacatttgggagctgatgtgcagaaaagcaaggacagcagatgcgtattttggcggcagagaagagcctcgtggacagaggcaacaatggacaataagatgtgaccgagaggggctggctggtacgagtgctgcggtgtatataactatgggtcacgacagatttctttgttctttccccactcccactgcttcctttgactaacttaaaaaagaatatggacaacagggaagaaaagttaagaaaagcagagagttgatccagaaggcctgatatatacctcttaggtgtggtgcacattaagtgcagaaagtctgaatgtgatgtcgtgggaggaaactcccaagagcatcgtatgagaaacatttccagaaacagaggcaagaatatcccaattggaaggtcttcctctcagtgttcagaaaattgggtgaaagtacgcctagccaaaacacagcatgcccaggaactagggttctctaagacccagcctctaacagtcctgaaaggcctgggtaggtccactttgaccctggcccctggggatcaggctgggaggtggctcacagcccagcctcatcttctgtttgcagacagcaggaactaatgaggcaggagaatagggaattagagtcacgggggttaaggcagaagcaaaaggacagcaggtgcagccagttctaggcagcacacaggccacatcctcactcccgtgataacaagacagcagtttccacttcagccccggctttgcagtggctcatacctgtaatcccaacactttgggaggctgaggcgggtggatcacctgaggtcaggagttcgagaccagcctggccaacatggtgaagccccgtctctactaaaaatacaaaaattagccaggcctggtggcgggcaccttgtaatcccagcagctcaggaagctgagacaggagaatctcttgaacctgggagggggaggttgcagtgagccaagatggcgctattgcactccagcctgggtgacagagcaagactctgtctcacagtagggaaggagagagcctcggaggagggggcaggtcggacccggtccacccccggcgtggcaccctcagcccttcccagctcccggtgcctcttaacattgctggcaggtgtgagcctggggtcgtgccagcctctgagcgagctcggccccttactcaccatttccagcctcaccttcctctcccatgaagggggcacgagggtaacagctccctcgtgggagtgcaaggctggtacgggctttagctgcaactctgagccctttcaccgaaaacgactcagagaagaaacagctgcacagaacattagcatccacccccaccccagagacggcttcccggagctcaacagaggagggcaggtatgcaggtgggaggaagaggaacgtggcctccctccatgtggctcctggtctgaaggccccaactcagacatctccagcctcccatggggcagctgcctgagtggcagctggtgtctggggccaggagacctgattctgcctagctgggcctcagtttcccaggaggcgacctgggcagagttacaccgcccctctcagtggcacctggcttgggactccctccctcccctctgctcttccttctctttactcctggggtcttccaggaaagtgccgatcccggagtaagatttggggggcagtttctgtgctggcctcaagccctcggctcaccccttccccagcggcagagcgagggcatctggtgctccaagaagaagagctgggctaggagcttagtgtgttccccacgtcacggggcctcttccaccccctggctcatggaccccatgtggctgcactacagaggccagccaggcttccagatgccggcaactcccctcccgggaccagccttctggaagggggtgttgagcccgtgaggagctccatgagtggggaagcaggtggggacggccgtgtgcacagcattactttggcagctgatgggcgggaggacaggtccaggcggcctccaggcacgttcctgtttgtgtgacattcaccgtgacatgctgcatgccgtggcacacagggtcctgtattcagatgagccagggcctcggaggaactcaggcggaggaaagagccggaacacaaacacagcgcgacctttcccgggaagcagcccctccaggaatgcgccccgggcccccctgcagcgccctgggcccccatggccaggggcagatcccctcacttccaccatccgtgactcggttcagtccagttgagccccaaaagcctctgctgagcccagcccggaagggcgagggagcctcggtggccagagagggccgaggcctgtcaggctgacggctccttcgggacaggcacccatctgtgacggggacatgcagggaccactgtggctgccctggcccaagatgccccagaagccaggtgggcagggccccttcctcctccaggatgtgggactgggctgggttttgaaggatggcagcggccaggtggactcagggcatggacagggaaggccacgcaggcctaaaacacacagactcaggtgggcgggaacttcaaggtcaaatccccgagccctcggagggggactcaggaaatcagttgctcagtggggggcagagtttggagccttggggcaggagccgtgtccagcagaggggctgctgcccgccatggctggccttgccattggctttggccccggccccggggaagtgcaaggcgcaggagagacaccacaaggcccttgggtgtccttcctgcaccttccttcggtggcaggcgggtgacgcatctatgtcactgcatccacgtaagatgctctgttagaaaaaaaacaagaaggaggccgggcgtggtggctcacgcctgtaatcccagcactgtgggaggccgaggctggcggatcacaaggtcaggagattgagaccatctggctaacacggagaaaccccgtctctactaaaaatacaaaccaaaaaaaaattagcagggcatggtggcgggtgcctgcagtcccagctactcaggaggctgaggcaggagaatggtgtgaacccgggaggcggagcttgtagtgagccgagatcgtgccactgcactccagcctggatgacagagcaagactccgtctcaaaaaaaaaattatgaatccaaattagatatgaaaataaatatttgaagtgataaaaaaacacacaaagctcacacatgaaaaagctgataggtgcactaaacgtcatcaaatggaagcaaaaaacaagatttgattagttactccctggcacacctctatcaaacttattttttctatatctcttggctgctaccccttgattattgcttcctatgaaaataatttttcataaatagcatggaaagataactccgccttcctgctgacgtgaggttcaggttggtttctcatcatcggttgggggctgaatgacacacgcggctgccgtcatgatgtgtgtgtggtgatgctgccacgggcgtcaccccgtaagcagcagctccgatcaattctcctttgcgaggtgaccaccaaaggagcgcagagctggccgggcattcgtgcgtgttcatgaccaagaacttttcacagagagagagaggacttctgtcctgatgaaggagcgcagagctggccgggggcattcatacatgttcatgaccgagaacttttcacacagagagaggacttctgtcctgacaaaggagcgcagagctggccggggcattcgtgcgtgttcacgaccgagaacttttcacagagagaggacttctgtcctgatagacgtcggtgaggactgaatccccacttacaggcgtgcacatcagggactgatggacatcgctgaggaccgatcccagcttacaggcgtgcacactggaggctcggaagagctgactgtgactcacttccggcttccccccaggacaaaacctgcctctccttccagactcgccgacttcccttcatgtcccgctgtgatgtgcagtccagcatccttgggtcatgacaccagctgcactggcacagggaatgagagaatattcctgaaaatgaagactaccgcggaaggcaggagcttctaagctagagtgactggcagcttcaacaggccctgctgcacctgaaccagcccggggccccccagtgccacggaaagagacagctgtggcagatttcacaaactcatgcccaggggagctcccggcttgctcatggcaaggaccacacaggggcatcttagggtccgcgggaggcagcggaactgtggagtcccagggcacattgtctccagcttcgccagctgggccattgctctccaacgccagcacccatgggtacttcctgatgcacctcatcctacccacgttactgtcagagtgaggaatgcgctcagcctcaggccctgagattgtcctctccttactcagcttctctttctgtccttgcagcatccggttcgcctcttcccccaactgccttttcgcaccctctgcctgctcttccctgcagttgtctgtgtctacatcattggcaggagttcctcgtgcactctgcatgctgaaaccgtgcagatggacacatggcagggctttccctcccgtctggcttgcctcctgcctctgttaaagacatgacgtgactcttcagcagcttttgaacttgcctctaggtcacaaagggattgtctcatcgtttctactacatatttttaaagttttgcttttcatatgaatccttttaatctgtccggaatcaactgtgtgccgtgtgaggtaggaaaataaatggatatgtccttttcgtacggataaaagcttcatttattcaatattttcccctccaatgtttttgctatgccccttattttccgattccatttccggtctgtttctggacgagttagtgggtgctgcacaccagcatggcacatgtatacatatgtaactaacctgcacattgtgcccatgtaccctaaaacttaaagtataataataattttaaaaaaatgtttttctttgggaactcctattctgtttatatcagagcctctcaatctattctccatatatgttacctttgagtgtgtgtacgtgtgcatttgtatatgtgtgcatgtgtgtgtatgtgtgtatgcatgtgtgtgtatatgtgtgtgtgcgtgcatgtgtgtgtattgtgtgtgtgtgttgtgtttttcaaagctgctgcactctggttggtttcctccactccattttattgctagatacaggctggagtctctgaatctatttgtaacacctcagtttctcttttgaatttttctttcttcattgactatgttagtactatcttccaggacactaagtctcttttctactatgtcaagtctggaatttatcctatctattgtgttttttattcactctactcttcatcttcaaaatttataattatttctactttctctctccttatttctttatattctggccacttctaattttatactacttttttaaaaaaagtctggtgtaagttcctgtaccaattgctcatttttagcctgcctttcttagtgtggtgtttccttgggtaatttggaaactggccttgcttatttcaaggtgaggatattgtgtctctgcatttctgcctttctctgccatcttgttgtcattgtcctctgtctagcagtgttttgtagcctctgctcccatcctgggtcccaggcttctgctctgcagtgatgcagagcatgtcacagataaagtcatcctttccgaggacggcttgtctcagcttctgcccttgaggctgtgttgatgtcctcttgccttcctatgcccacagtgctccactaagttatacgaagttacagctctgggatgtatcaaggagggtttctcagcctcctttctggagtcagggaagacacacccatcactcccaggaggtggatctaggccctctctgcctgccttgggacttggagctgacaggcccctgcctctgccccatcaccagcctgtgcttctcctccattccttgttttatgtgagtgtgtgtgtttgtgcatgtgtgtgcatgtatatatgtacacacctgcatacacacacacacacctgtcttggtcttctgtctgtctgacctattgctgctctgtgtgtggagcagagagggtccttactgcacaccttgctcaggacagtggacaccgtccttaaatgcacacggtatcgtgttcacacaggagggtccctttttttccatgatgaatctgaggccaagtaacctgcccagagatgcaggaagctcagccgagccccaagcccacgaccctcggactccaaccccaaacccccttgacggtgtgcacgtcagcccgtgtgggatggctggggggcgcctgttactgccgcacatgtccccaggaggcctgcacgcccttcactcccttcagtttcctcccaggtgaaatctgcaaacccgctcctctggacctggtcctgtccggatgatcctctggaattaacaagctgttattcaccagcctccagcaacaatggcacgttacctgctccattgcagaactggccgtggtttacatccaggaagggattggtcagtcacctgtgccaggtccccgggggatcctgagcccagcggtataaagggtggctgtgggagtggcacaccctctcccagccccagcaagcaaaccgtcaggcggccgtggactcagatcccggagatgaagcccctgctcctggccgtcagcctcggcctcattgctgccctgcaggcccaccacctcctggcctcagacgaggagattcaggatgtgaggcttggatgggaagggtgggctggaggggccacggggcgaggctgagactgctggatgaagaccccatccctcccccatccaaggagaccctcattttcgggttgggcgtaaaagccctgccctgaaagatggtgagatgggacagcaggagtctgggctggggggacagggatgcagaggggcagagctgggaaggtgggggtctggctgacttcacttctctcctgggggtgagggctcctgtggtcctggccaacttgtgggggctggagccaccttcgggtggacctggcgagggtgctgggtgttttctgggtggattagattggggaatgttccccgtctccagcctttggggtgcggtagagtctgggggctgcaggccagggaagggggaggctctggagcggtcggcctgagcctgatagagaggggccttctccaggtgtcagggacgtggtatctgaaggccatgacggtggacagggagttccctgagatgaatctggaatcggtgacacccatgaccctcacgaccctggaagggggcaacctggaagccaaggtcaccatgctgtgagtgtctgccagccggccggccagcctgcaacctggtctagggccttccctttctccacccaggagagctctggtgctggggaggtgggcagacctgctgggaggcctctctcagcccctcctacaaggctcggcaactggcagccttgagggcaaactgtgccactgaagaacctcagctggagggaccctgagggggcaaaggccccggatcagaccctgtgagctaccaggggcagtgctgggtaccacccacctcctcctaggactgaggaatgtgatctgcgtgctgaagccttctgctgagctggggcagaggtttccgtctccaccaccccccattctctccgaccttgtcaacaccctcagatgaaagtcgagagcaaaggggcagtgctcagcaagatacacctgacagagaacgctcaatgatgccagctgctgtcattattgtgctaattaaatacagagtaattctggaagaaagtgtaaaataataaaaataatagccaggtgtgatggctcagatctgtaatctcagcactttgggaagccaaggcaggtggatcacttgacgtcaggagtttgagaccagcctggccaacatggcaaaaccccatctctactaaaaatacaaaaactagccaggtgtggtggtgcacagttctcctgcctggtggttcacatgattctcctgcttcagcctcccgagtagctgggattacaggcacacaccaccacacccagctaattttttgtatctttagtagagatggggtttcgccatgttggccaggctggtcttgaactcctgacctcatgatccacccgccttgacttcccaaagtgctgggattacaggcgtgagccactgagcccagctgtaaggttcttatactagatgaaggtagactgtgataaattaaagacatactataaaccctaaagcacctgttaaagtcaacaaacaaacaagaaaacaaaagactgtcagtgaataagacaacaaataaactgaaaagattgttttaaaaactaaattcaaaagaagaccagtaagagggaaaggggcctggcgcggtggctcacgcctgtaatcccaacactttgggaggctgaggtgggcagatcactttaggtcaggagttcaagaccagcctcaccaagatggtgaaaccctgtctctaccaaaaatacaaaaattatccaggcatcgtggcatgcacctgtagtcccagccactcaggaggctgaggcaggagaatcacttaagcctgggaggcggaggttgcagtgagccgagactgtgccactgcactccagcctgggcgacagagtgagactctgtctcaaaaagaaaagaaagaaaaaaaaaatccatggcagacagaggccctgcagtgggatcggggtgaaagtccagcatctgtgacctcagacgtgtcacatccttgctcatcacagcttcagcatcgatcacactggcattcattcattcaagagacatttgctggctgggcgcagaggctcacacctgtaatcccagcactttgggaggccaagaccagtggatcacctgaagtcaggagttcaagaccagcctgcccaacatggtgaaaccccgtctctactaaaaatacaaaaatgttagctgggcgtggtgtcaggcacctgtaatcccagctactcgggaggctgaggcaggagaatcacttgatcctgggaggtggaggttgcagtgagccaagatagcaccattgcactccagcctgggcaacgagagcgaaactctgtcttaaaaaaaaaaaagagagagagagaattgctgaacgcccactaagtgccaggcaccattctgggtgcggcctcattgctgaataatgcgggcagaaaccccaactccgtggagtgcctgcttggtgagaagactcccttgtagaactctgtgagggtcagagacgatggatgggaggtcctgccaggaggaggcgctcaggaagtttcttcgctgctcctccccactccttcactcctttcttgttgctcctctttcaggcctgggtgtttggggagcttcattctctcattccacagatatgcctgcagtgccccgcctggcctgtgctgagcctggtccaggtttgttgaatgcagacgtgctcagagaggtcattccggctgctggtcactgggaactccgttgcatctgcctcgggcccaggtgcccccctttcactggagcatcagcgaagagcagtcacccccctccccgccctgggtatggcaggcccaggctgcagagctttcttcgtgaaacaggagctaaacatgatcaagatcttgccacgtcccaggcaggagtctcaccacactgctggtgtcatctcatgagactgcacaacaaaccttcgcagcaggtccccgagtgtaccctttcacagctatggacaggacccaaaagtctgagtcgagcgtgtgtgtcactaccctgtatgtggattcacagcctctggctatcttagaaggtccttcccccatggcctggctctgcccgtgaaccgttgaatgtctctgctccctttgccacttccgccttcctgatactggggaaccaggtcatctctctactctttcctggaatcttctcttttccaaggatcatggtgactgagaaactgaggagctgcacaggcccaagacaagccctctcccaccagcccacaaatgtactgcccatgggccgggcatggtggcttatgcctataatcccagcactttgggaggccgaggcgggcggatcacctgaggtcaggagttcgagaccagcctggccaacatggtgaaaccccatctctactaaaaatataaaaattagccgggtgtggtggtgtgcacctgtaatagccactcgggaggctgaggcaggagcatcgcttgcacctgggagacagaggttgcagtgagctgagatcgcaccactgcactccattctgggtgacagaacaagagtccatttcaaaaaaataaaaaatgtactgtccatgtttactgatgactttatgtagttagtggatcctgccagcacagccacagttcctgctgatctctgtcccgcagttgaccaccccgtctgtgtttttgccccagcctgtattgctgggcttgagtcttctgtcctcacgaccctcaccggggactcagacacagcccttctgctctggggacatgtcagtccttggcctgagcgtccaggctctgcgcggccccgttgtcattacagggactccgtccctggggaaacttcccacgtgtcagaaccttcccttcctttgtttgagaaaacaaaaaattcttcctctcttgaccaggagcagtggctcacgctggtaatcccagcactttgggaggccgagacaggagaattgcttgaggccaggagttcaagaccaacatagcaagatcccatctgtttatagatctatatctatgtatcatctctctatatagtacatgtaatatgtatataatatataataatcatatatataattcttccttttttgcggggggagggggttggagtctcactctgtcacccaggctggagtgcagtggcatgatctaggctcactgcaacctccccgtcctggttcaagcgattctcctgtctcagcctcccaagtagctggaactacaggcatgtgccaccgcatctggctaatttttgtatcttttttttttttttttttttgagatggagtttcactctgtcgcccaggctggagtgcaatggtgggatctcagctcactgcaacttccgcctccctggttcaagtgattctcctgcctcagtctcccaagcagcagggattaggcgcctgccaccacacctggctaattttttgtattttcagtagagatggggtttcaccatgttagccaggctggtcttgaactcctgacctcaggtgatccgcccgcctcggcctccccaagtgttgggattacaggcgtgagccactgtgcctggccaattcttcctttcttgaatgcccttttctgccatcctaattttcccatcgttcagggtcaaggttgatgctcaccttccccagtaagccctccctgatgtcttcccaattcctgtggggtaagcagggcagctcagtggctgaaggcacatgcgtcacagccaggaagccctggttttcgctctgaccccactgcttctggctgaccctggagaagccatccacgctgagctgcagaagggccactacagcctgtgtgcagccctcacaaggcgtatacgggaattactgcagcgatacgggggattcctcgaggagctcactgagcatgcaggtgttacaccccagagcgcgctgaaatcattcaaatgagccaagcctaagcctccctaccgcctcgcccaccccctcccatggaaaccacattacgggcttcacccacagttctgccctctcctgcctcctgaccgactccagcacttccccgtgtggccctgtgtggcttggggtaccccttctcctggaaactgtcgtaaactatcctttcaatggcaattatctcctgatctggtggccttactgaacctcaaattttcaataaatacgttgttttttaagccaggcttaatagcatgcacttgtggtctcagctacttgggaggctgaggtgggaggatcgcttgaggccaggagtttgtggccgcagtgcagtataattgcacctgtgaagagccactgcactccagcctgggcaacgcagggagaccctgtgtccaaaaaataattattatattttaaagacaagcagactatgcatggagtcccgagggtgaacaggtgtcggggggcagcgggagcgtggagaaagccgggaggaggtgggaacaggaaaccctcagggtcacaccccagaaggagaaggccctagcctgaatgggactgctgggaaggggctgaacaccagcagggagtggagctgcggaaacacacacggaagtggggcatgggtgctgggtggacactccacttccagataagaggggatcttgtggatggtggtggaggcgctcctggccctactgggctccggcactcagcctgccctgccacaaaggcagcccatactagaggctactgcacgtcaggagaggggcaggctcaaaaccagaaaagttatactctgggctctgccagccccaccctcccaatccaggaaacccaattcatccaaatatgagtatcaatatccacccaaagataccagagggaaaaaagaaacctaaaaggagcgggtggccagtgcagtgctcactcctgaatcccagcactttgggaggctgaggcgggaggatcgcttaagcccaggaggtcaagactgcagtgagttgtgactatgtcactgcactccagcccaggcaacaaagcaagaccctgtctcaaaaacaaacaaacaaaaagggaacagcaagacttccctgcagatgaagaaaacacagagaaaaccactgccacaaagccaagtgaaagtggcaagccagcgggcagccccatgatgcagctggggaagtggccaggggagtggctgcagcggaaatggccatggggaactctgcggccccaggaagaacaggtggacaggtgctggtggaacttaggaaggactggaagcaaaggccacagacacaagtctagagatgctgtggaaagtgcagccaggaagaaacagggacgtgaagaggcacaacagcagcagagcaagcaggcaggagaggcggtggcgggggaggcagcagcaggggaagcagcggtggggaggcagcagcaggcaggtccttggctggcagggcagagccaagacaggacagactccaaggtagaagtccagacaactttgctaaaacaaacgaattgaggcggagcattactgctgagctttgcctcctgtcagatcagcggtggcattagatcttcatagaagtgcaaaccctactgtgaactgcgcatgcgagggatctaggttgctcactcctaatgaaaatctaatgcctgatgatctgaagtggcacagtttcatccccaaaccatccctcccaccacccctactgtccatggaaaaattgtcttccaagaaaccagtcactggggcaaaaaatgttggtcaaaagtaccgctgtactagagagtgaattttagttaactgagagatgatcacagatagtaagaggaacagggagtgagcactcacatattcaactagaggacagggaccgagataaaaacagcagcaagttgtgatgggtacgtacagtgtgttccctgccaaatccacacactgatgtcttaaccccaagcaccacagaacgtgaccttgtttggaaatggtgtcactgcaaatgttattagttaagatgaggtcactaaggtgggctctaatccaatgtgactggtgtccttattataagaagaggcaatcaggacccacagacaggcacagggggaagatgagaggatgctgtttgcaggccaaggacagcacccaggaacagccttcactcagggtcctcagaagaaaccaaccctgctgatgtctggactggacccctgccctccagagctgtgaacaatgaattcctctcacctaagctgctctgcggtgctttgttaacggcagccctagcaaactcatacacaaaggtaacagaatgtgtaaaaaaacaattttacaaaggcagctataacagtatgagacaagaaagcagagagaggatggaaaatagaatcgccctgctgattccttcatattatagttggattctaaagacatcacttaatgctgacaaactgagaagtttagcatattaaagaggacagaggcaaatactaagaaatataatagtattcattcaaaaaatgggtgggccgggcatggtggctcacacctgtaatcccagcactttgggaggccgaggcaggtggatcacctgaggtcaggagttcgagaccagcctggccaacatggtgaaatccatctctactaaaaatacaaaaattagccaggcttggtggcgcgcatctgtaatcccagctactagggaggctggagcaggagaatcgcctgaacctgggaggtagaggttgcagtgagctgagatggcgccattccactccagcctgggtgacagagcgaggcctgtctcaaaaaaaaaacaaaaaaaaacatgggtggtagaaaagagagagaagggagagaggggaaaggtttacaaattatttcatagtagggaactattagaactcttttaaaggttgaggggactaaagatattatttaagggtatgaacagtaagtagcaactagacccaaaaaaaatcaagccttcctaaaaaccagaagagctacattttttaagagcaaatgcagattaagtaatgactatatgtagtaaatgtgaaataaaacaatttcaaaaagaacaaagttggaagactcatgctacccgatttcaacacttactatagagctgcagtgattaagacggtgtggcgctggcgaaaggttcaggggaacagaacacacagtttagaaatagacctacacagatttatggccaattgatttcagatgaaggtacaagggcaattctacgaagacagtcttttcagcaactggtcctggaacactggacatctttatgcaaaaacgaaccttcaaaatggttatgccattttatttatttatttatttactattttttgagatggagtcttgctctgtcttccaggctggagtgcagtggcgacagctcggctcactgcaacctccgtttcccaggttcaagtgattctcctgtctcagcctcccaagtagctgggattacaggcacctgccaccacgcccggctaatttttatatttttagtagagatggatttcaccatcttggtcgggctggtcttgaactcctgagctcaagtgatccacctgcctcggcctcccaaagtgctgggattacaggagtgaggcaccacgcccggccacaagtcctttattatactgtatgttttacaaatattttctcccactgtgagcctttttatctgttttcctaatttttaatttttgatgaagtgcaataattgacagaatgaatagatagaaaattggcaccaggtgcagtggcttacgcctgtaatcccagcactttgggaggccgaggaaggcagatcacctgaggtcgggagttcgagaccagcctgaccaacatggagaaaccccatctctattaaaaatacaaaattagccgggcatggtggcgcatgcctgtaatctcagctactcaggaggctgacaggagaactgcttgaacccaggagacagaggttgcagtgagccaagaccgcgccattgcactccagcctgggcaacaagagcaaaactctgtctcaagaaaaaaaaaagaaagaaagaaagaaaaaagaaaagaaaattggcaaggatacagaacttgaactccactggacctgacattaaaacacttgactcaacaagagcagaaaacattcttctcgagcacacacagaacatttaccaggagagaccacagtctgggctatgaaacaaaccctgttaacttcaaaaagattcaagtggttttttgttgttttttgatacacggtctcactctgttgcccaggctggagtgcagtggcaggaacatggctcactgcagcctcaacctcctgggctcaagtgatcctcccacctcagctttctgagtagctgggactataggcataggcgtgggcaaccgccccagggtgattttttaaatttttttgtagagacagggtctcgctgcattgcccaggctgacctcaatctcctgggctcaaatgatcctcctgcctcagcctcccagtatcgggattacaggtgtgagccaccacgccccagccaaggactcaagttatacaaagtatgttctctgaccacaatgaaattcaactagaaatcagtaacagaaagatctctggtaaattcccaaatatttggaaactaaatgacatacctttaaataactcattagccaaagaataaatcaaagggaaattagcaagtattttgaactgaatgaaaacacaacatatgaaaattcgtcaggtatcacaaaagcagactgaactttttagaccttacaaatgcatgactgtcccccttgcctctgatcttctgcctggggtctgcctttccccaatctttgttcactatactgaatcctacatgacacagtcaacctatgaagaaatccagagatagactctctaaaataaatggatttgggaatagcagcttatctggaatactgcaaccgttgaggatggtcttgcagtgagtcctgttattggtctgtttgtagaaatgtcttgtggtaagtcctgttgcaggaatgtgtgcgtgagggctgcttcatcacctccaactgttttagtttgacataagtgactccattttggtaccggcaacgttcacaactttccatgtgacttcagcaccctgcaccccgatcctttccctggccactttgcaggaccactacctatgagactatgggttccttgagagctagggctgggtctcattcgctcctgaaactttcacccagcagagtgatggcccacgccatgcatgacatgcgttgctcaatgactgcatccactcagccagtatgccagtccccactgagcctcactctcaacctccctggctggcataggttccttgtgcagacatccagtggcagtaaaatattgctgggttctcagcttcccccacctgcagccctcactggcccacccagttgtcctgtctctgctcaggacgagaccccccccgcctcttcagtctctgtagccaggtgatggcagtggccttttccagaccctcactggccccttagttcactatgatgacttcacctcttgggaacccatggggatgtctttccctccaatacatctacatttgcctgacccagaatgtagtttcaagatgggtccatgcctggctccaaatccccttatcagagtaaggaaataccttaattcctagtttgctaaaaactcgttataaatggctgtcgcgtcatttactgtgttcctgttctgcaaccattgagatggtcacgtgggttttgctcctttaatctattgatatgaattacactcttgattctctggcattgaaactgctttgcaattctgaattaaatccagtgtggcactttgctaaacttggtttattattgtctaaaatcttgacattggtatttgtagggaccagccccacagggtccgtgggtctctccctccctgtgtgcagcaatgagagagtgtagaaataaagacacaagacaaagagataaaagaaaaggcagctgggcctgggagaccactactaccaatgctcggagaccggtagtggccccgaatgtctggctgcattgttatttattggatacaaagcaaaaggggcagggtaaagagtgtgagtcatctccaatgataggtaaggtcacgtggatcacgtgtccactggacagggtgcccttccctgcctggcagccgaggcagagagagagaggagacagagagaaagacagcttatgccattacttctgcatatcagagacttttagtactttcactaatttactactgctatctagaaggcagagccaggtgtacaggatggaacatgaaggcggactaggagcgtgaccactgaagcacagcatcacagggagacggttaggcctccagataactgcgggcaggcctgccggatgtcaggccctccacaagaggtggaagagcagagtcttctctaaactcctccagggaaagggacactccctttcccggtctgctaagtagcgggtgttgttccttgatactttttgctactgctagaccatggtccacctggcaacgggcgtcttcccagacgctggcgtcaccgctagaccaaggagccctctggtggccctgtccgggcataacagaaggctcgcactcttgtcttctggtcacacctatgtcccctcagctcctatctctgtatggcctggtttttcctaggctatgattatagagcgaggattattataatattggaataaaaggtaattgctacaaactaatgattaatgatattcatatgtaatcatatctaagatctatatctgctgtaactattcttgttttatattttattatactggaacagctcgtgtcctctgtctcttgcctcggcgcctgggtggcttgccgcccacaggtatttggtaacttccctttctcttacctagttttggtatcaaagctaagttcacgaatgaagtgttctctcaattgattctgttacaatttgtctacgtctggaattacctgttctctatatcgtggaacttccctgtaaaaccgtctaggggaacattcttaactactgactcaatttcatcagtgattacaactcaggctttctattacttttagtcagttttggagatttttcttccatttactttgagttgttccaacttaagctgcatgcttatttttctttagctttaaaaatacagacatacagtgtatgtgtgtataaatggcactatttatctgtagatgcacatacatttaggggctatgtttttttgtgctgctttagctctgttccacaaatcttaaattttttctttttgagacagtcttgctctgtcacccaggctggagtgcagcggctcgatcttggctcactgcagcctctacctcctgggttcaagtgattctcccgcctcagcctcccaagcagctgggactacaggtttgcaccaccacacccagctaattttttatttttaatagagatggggttttatcatgttggccaggctggccttgaactcctgatctcaagtgatccacccgcctcccaaagagctgggattgacagcatgagccaccatgccaggccctgttccacaaattttaatacgtagcattttcattatcctttagtcccaaatatttctaatagccattcggaattctttaactcataggtaatttataagtgtgttttaaaaattccaaatatgaaatgccactgcactccagcctgagtgacagagcaagactctatctaaaaaacaaaaaaaaatagctcaaattttttttaatgacattgggatacggtcagataacgacactgattccttgaaatatcttaagacttcttttctggacaaagtaggtggtcagtttccatccatgttccatatatgcatggaaagagtatgtattcttttcagatactgttgtgtctgtctctcagctcaagctcatgctcacctcacatcctatctttcacagggctttttcatcagttgcctctgtctggtaacagtcacaccagctcctgttcagttacagtctttgtctcgtaaccggagagtttcatcaaaagaattttatttacagctttatcatccatatgccactaaaattcacctgttttctttcaacctgcactcattttgattgcctggaactctggatttaattcttccatcccactttttatcttgcattcacttcactctctctccagcttttattctttctttctctttccctaggtccaatgcacttgacccaactcacatgcgtggactccgggaaggtactgctccctccctccaaattctgagcagtaaaatgccgccccggggcactggggaacagaaaggaatgagaccccaacaggcagaagccaagagagcggggaggagccatggcgttctgccccaggatgcaccacgcctggacgtgctcccccgactcccagtgccaggtgcccatatgccacacctcagggttgtcctctgttcgggtgagctgcggactaacgtggcccggcagcagaggccaccgtcttctgtcccgtggctcctgcgaacacaggcagtggggaacaggcagtgactgcccacccccaccgttcctcctccctgaccctgcaaacctcggggaagctttcaggcccgggaaagcagaccaggccccagtctccctcaccctttccctgggtctgaaggtcccggatcctgcgttcaaggatgacgctgaaactctctctttctcacatgggatctgtgatctgggccctcacaactcagcagagcaccactgtgtccccctcacatggagaggccgaggtctgtggagatcctgggacagagccagcgtcaaggactcagagggtgtcctggagtctcctaggacggaagacggcggccccaggtgggaaagactcagaccaggcctgcgcgctccaggtcctgcggcaggatgcggcccttcttgcgggctctgagcaggcggcgctcggcgcgggccgccttcttcctgcgcaggttctgccgccgccggtcctggcgctgctgcatcttctccaccacgccggccgtgcgcttctcccaccggcgctgccgctgcgccctgcgcttctccttgcgcttcagggcctcctgcagcaggcgttcgtcgtcacggatcttcacgccctccgccttgtagaggaggttggtccacttcatcttcgcctccagctcctgcgccttcccctcatcctggccgcgcagctcgtccagccggctctgccgtgcctgcaggcgctccagcagctgccggtagttcctcccggtcagcggcgtgaggttccccttcaccctctgcctcttctcttttctgcgctgcgccttgctggccggctcgtcttcgctcacctccacctgggaggaaggtatgacatcagctcatgccagccctgcactaggccccagccttggccagtaccctaagggacctgcgaggtccccgtcaccaccttacagacatgatggggttcggagagagatcatgaagctaacaaggggcaacgctgaggcctgaagccgacccagcccgcccaaggacccagctcccgctcaccttattgaagatcagcccgggcggctcccgcggctccgtgcaggccccctctggggttgcctccaccacctcctgggcctccgtggcctcctcagccttcctggccttctctttcgcccgcagctcctttcgcttcctcttcttccggtcccgttcctgctttctccgccgccttttctccaaggcggcaggggacagctccttggcactgccctgggggaaagaggcacccactcattaaagttctctcgatcccagggtcccccagcctggcccatagtcgagaagaatcagggctggaaggcaggtgagaaaatcctcacgcaaacaaggggcccgcggagttcaatgttccaccatgatgttccccaaaaagcaaatgaccccaaaagagagaagggacccccaaataagaatcacagcttccaattcccgggtgcttaccccgtgccaggatacattacgcacatggtttcaaatgtcatacatcgttttatagatgaggagggtcaagaccactgcctagaacttggagttggcgtctgaacacctgtcctgaccgctgcccattctgttcacgaggtacccaacgaagccctccccaatggcctttcccatccccgggccaacaagagccctacaccagcccaaacgagacctgtgcttcaggaacaagggcccagagccttgctcacctcttaggaaccacacactgtacctcgggatggcggaggagagtagctggggactgtcccccacacagcacgaggccttaaggaagggccccaggaaaagggtgggtaggggccaacacaggggagacagtaccattcagcacaaagagctgcattggtgcttcctgtgcctggccactcagctcaagtccctactcaactcacaggactattacgacattcagagaaacagacacaggaggtgcccatcccagtgtcagttcagcaaaggcagcttcccagaaggaaggaggctgatgagcttggggactgaggttctccaagaaaataactgctctcccagagcacacctgctggggccctgccagactcgctgcagaggggagaacaggggctacggcccctcgctgacagctgaccccagggagaacacaggcagagcagtgacggcactccagcaaacctgcccgcctacctggccccgggcctcctggatcttctcatgcagtcgctgtcgcagaacatccagagcaaagacagactcaggctcagtggccaggccatctgcagggaaggagacaggactgcagggggccctctcttcccctccccctccctccctagggccacgaatccctgtcccactgtggccactcatggatctgcagggcaattccagtaaattccactccaccgcttcaacctggactggttcctacaacatcctccaggacaggtaactcagtgcctcacgaggtaggtcaccgtggtatgagaaaacacttcctacggtgcaagccaaaccacctcctccaaattttgtagcctgggccccagaacaagttggctctcacaaggcccctgcagagacctgagggcagggaagctcttcaagccaagctgctccaggtcctcagagagacacagccttgccccctgacatcctgctagccatgtggcctggaatgccacacagttccttcggtcccatccaccctagcactcctgtgatctttgctcttggggaagtctcgtgctatccctgtgcgcctgctgctgctttttttttcttaagagcaaaggggaccaagcccaagcccagccccagccccgccctgcacagaaccaacatgccctgaagcctctcacctgcagggttccctgctgagctggaagcccaagctgcttcctctttggctgcctcaggcctcctggccccagaggctgctggagatttctcccccaaggacttggccttgtgctcagcagccttctcttctcgcttccggaatttcttttgtgttttcttccttttcttttttgggggccctgcagtttctgagccttgagttttgccagctgaaatgcaaaataagaaagagttaagtccccatctcatggcccattcaataggcaggaaaggctcaccaaggctttgatcccaggaagatgccgaaagaggatcaggatcgggggccagagacactgatcctagagctcagaaccacaaccttgacccagtagttctgcttgtgagaattcatcaggcacaaagatgaggcttcaaggacgttcatcaccattatttgagtgaaacattagaaaaacctgaatatccacctccactaacaatttctggccctgctttacaataagctaccatgctgccatcaaacacaatggcaagggctttcattttagctgctgggggttatgtttacattttttcttttttgagatggagtctcaatctgttccccaagctgaagtgcagtggcgcaatctctgctcactgcaaactccacttctcgagttcaagcgattctcttgcctcagcctccggagtagctgggactacaggcgcccaccactgtgcccggctaatttttgtatttttggtagagacggggtttcaccatgttgtccaggatggtcttgatcttttgatcttgtgatccgccctcctcagcctcccaaaattctgggattacaggcatgaggccgcacggccggacaatgtttacattttaaatgggagaaatcagtctaagtaaagtaggagctgaatcgttttaatgaaaaaaaaaaaaaaatttcaaaaaggatgagaaagacagacggaagacatactaggtaatgagaaaattcacttaagattttggatttgctataaccaatatatcgtccttgaataaaaaggaaaccccgttttacctctggtggttccagagaccctgctgctctcctctcctcctgggcccagacagcactgacacgtccccgctgtcggcttccccacccgattatctacttcccttgtgcagcgtggtcaccaggccatgagaaccctaagcgcaggagccctctgccatcctcctcctccccacaccgcaccatgcccgtagtgaagggactgaaagggtcttttcccactgactgaccattactcctgtctctactaaaaatgcaaaaaaaaaaaaaaaaattagctgggcgtggtggcgggcgcctgtagtgccggctactcgggaggctgaggcaggagaatggcgtgaacccgggagacggagcttgcagtgagccgagatcgcgtcgctgcacgccagcctggacgacagagcgagactccgtctccaaaaacaaaaacaaaaacaaaaaaaacaaataagggaaacggcgataatttcacaagtcacttagattttttttctagtactttacagactcgtctacaccggctccggccgcgtcccccgtttcgcaggccccttagtcccggcccggccctgtgcgttaccccgcgtgcgcgcctgctgttccggggccgaatgggagcagatcttcttggccaggctctgcaggtaggcgtccttggcgagtagagaggccatggcggagacccgggccgttcacgactcacaccttccccgctgcgcgtgcgactctcaccacctccgccggaaaccaccacacgggcaggcgcggccaaacgaacgccgagccgccagcccgcgcgctcgattagccaagcctgactccgccggaagcggcgcgcggggcggggcgcacagcattgcgggccgaggacagccaatctccgcccggagtcggtgcagcagggcacccccggggcctggcctcagtgcctcaatcaccccggtcccgcacgtgttcctgtgctcccctcacccccaaccccgacacagcaggcgctcatgagtaggggcgaaatgaatgaatgaccagcagtacattcattccgtcctttggagtggggggcctcaggtctcaggcggacacagactgagcgcctggcacgtggcaggccctaggttcagtcctaggggacacaagcagtgtgtcacacacacagatgtgttctcggcgagtgtctgccgtagaggtgactgataaacctggcaagcgtgtgactgtcaggtgaggggagcgccaaagaaagcccaggggaaaagggagaagtgttgggcgggagggagcctgcatgttcaaggaagaccccctgggcagtggcttttgctctgaaaaatagaattacacactacgattccctcccccaccccggtgacggagtctccctctgtcgcccaggctggagtgcagtggcaagatctcggctcactgcaacctccacttcccgggttcaagcaattctcctgcctcagcctcccgagtagctgggattacagacgtgtaccaccacgcccagctaatttttgtatttttagtagagacggggtttcaccatgttggccaggctggtctcgaactcctgacctcaggtgatccgcccacctccgcctcccatagtgctgggattgcaggcatgagccaccgtgcccagcccacactgcgatttttaacacaagatgtggtctttataataactcactaggggcaggagaaaagagaggtcatggcctgaggcttgggaccaccacaccccagttcctgcactggaaaattacaggctcattaaggacccagagccccttccagggccaccccgttggtagagaagggagaacttaagagtcttaaattacaatttgaaaaggtggctgctgatatatatattagaaacagaactgttgtatttgaaacagaactaaactttcttcccctaacttctgccatgaggtgatttaaaaaaatttttttggccaggcgcagtggttcacgcctgtaatcccagcactttgggaggccaaggcaggaggatcacttgagccctagagttggagaccagcctgggcaacatagtgaaaccctgtctccacacacaaaaaaatttaaaattagccaagcgtggtggccggcccctgtagtcccaactactcaggaggctgagaagagacgattgcttgaaccggggaggcagaggttacagtgagccaagatcacgccactgcattctagcctggagtgccaggctgtctcaagatatatgtatttttttcacttttaaaaaaggcagtcaaatttagcagtgtgggggtcgaatgccaactatagtgacactaaggttaattagttctgacatcccactgccattcagaccagcctagaggtgatgtttcatggaggataggcgtgacgctgctgctgactcccctgaactgctgggtatcttaacaccatcacctactgagttcagaatgggcatctgaccccccaagccccatctcttcctctcactgtcaacccttttttcagttaaagcggctccatccttccaggtgcttgggccagaccttgaaaccactgactcctttcttattccccacatccaatgcttcagcaaatcctgtcagctgtgccttcagagcacctccagaatctcagtggacccactcccatctcatcaccactttggtcctgttttatttattttttgaaatggagagtctcactcttcctcccaggctggagtgcagtggtgtcatcttggctgactgcagtctccacctcctgggttctgcctcagtctcctgagtagatgggactataggcgtgtgccaccatgcctggctaatttctttttcttttttctttttttttttgaggtggagtttcgctcttgttgcccaagctggagtgcagtggcccgatctcggctcactgcaacctctgcctcccgggttcaagcgattctcctgcctccgcctaccaagtagctgggattataggcatggaccagcacgcccggctaatttttgtatttttagtagagacagggtttctccatgttggtcaggctggtctggaactcccgacctcaggtgatctgcccgcctcggcctcccaaagtgctgggattacaggcgtgagccaccgcgcccggccaatttctatactttttagtagagacagggtttctccatgttggtcaggctggtctggaaatcccgacctcaggtgatccgcccgccttggcctcccaaagtgctggggttgcaggcgtaagccaccgcgcccggccgatttctatactttttagtagagacggggtttctccatgttgcccaggctggtctcaaaacttctgaccacaagtgatccacccgctttggcttctcaaagtgctgggattacagcaggagccactgggcctgacctggtcctgttttagattttaagattccaaaataacaaccaaatgcaacacacaataaaaataggcataaaagcctttcagctggaaccgccaccttccagtaattcgccaaaatgacgaacacaaagggaaagaggagaggcacccaatatatgttctctaggcctttcagaaaacatgcagttgttcctttggccaagtatatgcaaattgatgagaaaggtgatattgtagatatcaagggaatgggtactgttcaaaaaggaatgccccacaaatgtcaccatggctagactgggagagtctacagtgttccccagcatgctgttggcactgttgtaaacaagtaagggcaagattcttgccaagagaatgaatgtgcatattcagcacactaagcactctaagagccgagagagcttcctgaaacgcgtgaaggaaaatgatcagaaaaagagggaagccaaagagaaaggtacctggattcaactgaagcgccagcctgctccacccagagcagcacactgtgagaaccaatgggaaggagcctgagctgctggaacctcttccctatgaattcatggcatcgtgggtgttaaaaaaataaaagacctctggactagaaagaaaaaaaataggcattaaaaaaactatttggggaacaactgaagaaatctgaatacagctagataccagaggatatgcaatcatcatccattctggttgtggtgatggacgaaggagaatgtgctcagagaggcaaactgacaagtacttccatgagttccactgccctcaaaataaaaagcttgggataaaagagttacatggactgagaatgggccggggcttagcaatgtggaggccactggtgaccttaataggtgtagttttgctagagtcatggagacaaaacctgtctgacgtaggcccaagagagaactgcaaatggttatcagctgcttccccgtggagctctgctgccaaggccatgagctggagaggaaaaaaggtcagcagagcggcttggctttaagaaggagaaataacttgattttcacatgggaatgatggtcctggccaagcagaaaatgaagctgatggcaggtcttatcgctcaggattttaggaacagggtaagtgggatcccaccacaaagtctggccagttccttccgggctctcgcttcatatatgcttccatctggttgtaatctttttcttcctcagtggttaagtacaaggcatttccacagctaaaatagtgcgggaacagatcaccacacgtatcaatggggaaattctccctcagaggggaagcaacttccctaggccaccccagaagccaggtccagagccaggactgggcctcaagctcctgtctgtctggtgccttctgcttggctgtggggttctctggttcaggtggtgatgggtcagctgtgttcttacctgtccccaaggctggatcctgggctgtcacctcattcatacatcgggaaagacgatggcctcccccatgagaagatgaagcacatggatggtgctggaggaactggggtggggtgctcccccacagtgctcccccatacttcctgtggacgaactgtgctccccccacacttcctgcccagtgttgtgacttctgcatttctaaggtgagcctggcaccaaaagacactgggtctagacttccatcaggttcaagttctgattcctgccacttcacttcctagctctgtggccgtggtacacctcaccccttctaagtccacatcctctcctctctaaaataccggcactaggagcaccggctctggtagcagtgaggatgagatgccagcagaggcacaggtgcctggatgtgcaatgatggcagcaggtccattcactgaatactggggacctaccaggtgccaatgaggagagagtgaccttgggccaggctgtccaggcagagctgaggagctgctgctcggacaactgctgggagaccaaggatggtcctggactgacaaggaatgaggaagaaagagcagcaatgcaaaaaagtggcggtgttttaatcaagtctcattacaacggcagaattaggaatgagtcccacctagcttccacatgcgtgggcagcagctgtcacacgggcctgtcgtggcactcagcccatggcacagacatatgtggctcagggcaagaaccagtggatggggctctgcacaggaacgctggcctcgggatgggagacccggcctgcccaacactgctcagagcccctcccaactctgacaacaggctcgggtcaggactccccgaaatcaggcaccctcctgccccactgctgagatccccaacgggccagacctagcttggaaactttcttccacctggctggccaggaaggcagcaaacagagatgatgactcggaatgatgggctattcggaaatggctagggaaacaactgtttccctactgtcctggtgggacccaccctgggctaacgggcttcccaaggaagtcctagtggctctggggtcctgaagtccccaaatgggaacctaggctgagagaagcaaggctgtgagggcatccaaagggctgcctcaggttttgttcctgagaacgaagcgtggccccggaggctcaggcgtgctcagtggggccagggccaccagcatgggagtgggcaggggctgccacctgtagggggccagcactgggctccggggacgccagcagaggggccgagaggccatcagcagagtctgtgtcgaggtccagcctcccgtaagcttcgcacagaggcaggtcattagcttcgcaaaggcttgagcttttccaccaccagaaaccccagggagagacaggagcaggcagagaggaaagccaggggaggggagagcaagacagaagcagagttaagaaaacacgaccacaccccagacctgcctttccctttctccactcctgctccatctgtcccctgagttggcaggcctggcaaggagaggcggccagtggtgagagccaccctagcattctgaaaggaggaagccgccctggcccaaccaccaacagctgtgtgacctcagcaggcccttcctgcccagcctccacgtgggcctgtcctagcctatgcctcccagctggtgctggtccccctcctcttgcaaaaagctgtcagcctggccaccctccctcctccctgactgcagaaaccccagtgtcactacactgcaaagagctctctgagggcagactgtgttctttctgggtctgtccctgcctgagacttagcctgaagggggcgacagttgggaacacaggccctggcacttcccgatagccctacatcagccaggcggcctccagcaggcgtccccacctctaacacggggaatcctcacggcagccaggatgcaggtgaagagctcagctagcccttcccatgcccgcagctgtgacaatccacgctcgcctctttctaacctgcaggcaggggccctggctttcccgcggcctgcctcgcccctggcttcctcccttgctcctgccctcagtgttcagtctcagaaccgtcctgggcacagagtggcatcccgaggaaagcaaaggagaggcagagccagaaagagcaactaacaagcagagagggggcaggcgagcacagaggcgcagctcatgcggaacagggcagggcagggcagggcagggagcggagcgccctttgggggaccagcaagaaggggcagaggaaactcggccaggacctggtcgcttaaaggcaatgtacagaggagggcaactgcttctgccacaggggctgtgtgaggccccccagggggcgctggtgtggacaggaggcctgcgggaggggacacaggctggcctggaagccccgctgggtgaagctgagggactgttgggggagggcatgggaagcctggcacagatgtcctgggtttgcgccctgctctgctgcagggccgtgagcaggttccctctctccctgccccaaggcaaggcaggcaggctgaattacaggcccacagctgctctgtgcaggggccctcagggacggtggctgcctcaaagagaccgacaaactgaacagctgtggaaggagatgcccagaagggtctgaaacaccccaggacccctctcagccaccctagtgtggaggaaatgctgcctcatgtctgctgagttaatgagtactggggaccaaagattccctcagaaccccctggaaaactctaggactgctgcagctcagcagtgccactgagcccagggcagggaaaccaagccccaggtcatgctggctctggatagctgtggctcccagcatggccaatgggcagaaaggagtattttaaatccaccaccaggaaggaaaggtttgtccaggagaaggcacaagatggacatggactctgcatctgctggactgaatcttgattttctaagctaatggggcagagtggaaggcctccctgtctccagcctaagtttccccctaagtaaatgatacgtagactctgatttctcagggcccctccagctcaaacggtcgaaggtttcagcttcttacggagccccacaagggtcaggatgatgggttttgacccttctgcatccctgggacccagcatggggcctggcacgtaggttggctccagctccgtggataaggctgagtgggtcacgaattggagctccaatggctttcaaggccattccctgcctgggcttcatcccccacattcccatgactgtccctgcctccacactggggtttggtgacatccacatggaattgcatccctggtgccctggacataggtgtggacctgactgcccaaaaaaggctggcccagccttggctgaaatctctacatatggattcagaaggtaacaggagcagcacagccccagaacgcactgcccgaggaggaaggctctcggaagagggcctgcgggggatacagccaggcgcctcccttctccagactcggcctatccgactggcgtgagtcctgtggttttcatcacattgcactgtgggaaaggcccagggccctggcatatggatgtgaattgtctgtcggtcaaacgctctggccaggagctctgctctgaaacccaggcatggctccactgctaagaccagcaagaatttgaaaaagcagaaggcagccctgcctgctggccaggcccaggtaggcaggctcccgctctgcatggggagtccagcgctatttatacctggacgagtaatactcctcctccagctcgtagaggtcaatggagatctcgtctcgcagcgtgatgagcttccggtcgcactcctcctgcagtgtgcgcagctgctggttgcgctggtcaatggcctcgttcacggaggggaagtcattgaggatcaggaactgcttgaggtcggacaccagcttcatcagggactcgccggctcggacctgtggccatcagaaccagggcgggcacagggtgaggggggacagcggccttgcctacaagtagctgatgctgggcaagggatggcctctctaggagcctcagcttcctcatctgcaaagtgggactctacccctgacctccacaggttcatgtgtgagaattaagtgagaaaactgggatgtcagttctgcagggcaggccctcccctctcgtcagcctctggcttccactcctgcaggactggcctccagtccaattatgcaggtgtacattctgctcatgaaaaactcaaaccccacagataaaactgcgatcccattttgcctcctgccccggggtaggattaacatggctgccagctgggcagagctcctgtgggacctttttccatgcattttgagccctggacgtgcacctgcggaattatctgcttgctgtgtttctcctgtgatccgaaggaatccaatggcgcctacagttccattcggctgtttgtcttttcactcacaactgaccttaggaactcctgagttagcaggaagggctaccctctttctggccactgcacggctacaggacgggcatgggtggctctctgcccagccctcctccaagtgccccacgtgaggacagtctcctgagaaatgatttgcccccacctcattctttaaagctgccgagtggtgaaaccaaagcatctctacatttgcctccttctgctccttctcgggggaagaagaccagaccagccccagagccccctccactccacccaggaaacctgaggggactgatgctcttggagcccaggccgtgccctccaccctggccactcacgatgttggcggctcgcacatgcatctcgtaattgtcctgttcaccctgagtggcccgtgacacctgcgtctcgtcctcaatctgggggaaaacaagaaaacctagaaatcaacccagccaaggcatccccacccctggcccggcccagcccagcttacggtaactgtcatctacccaggatgtccacactggccacaacctgtctgtggtgccatctacagacctaagcgctgtcagccagacctctgacaaggttcaattccaccctctcttgttctggccatgggagacaacatgcacctttgctcaagacaaatagaggcaacccacgctgcttgctgtgctaggtgcagggatgggggcttatcttggcccggtctttttgggctgtgggagccctgtttggtaggaaccgttgtcacttgcttggcatttggtaaactgttggatgagtgaagggatgatttaagttttttttcgcgaccatttcctgatcacttcccaggtgccaggctgtgtcatgcacttgaccaccattaacccatgccagtttcacagaagcctggcctgccacccctggtgtataggtggccaagcgaggctggatggggcttcccggcaggccttgcaaaggctcagttcggggtgggtgtcaggtaccctcagtggttaagacccagacttcgtgggttcaaatcctggctcagccagttgtgagctgagtgaccttgggcaagtcactaagtctcctgggcctgggtttcctcctgaaatgaagaggacaacagtgcccacctcacagagtcctcatgaagattcagcagaacaggcacagataacctcacaacgtggcttgatacatggcaagcactaagtacatgctagcttccatcctcatcatcatcgcttatggagcctgccaggtctgcagcagccaggagggatccagcccaatctgatgcagctgtagctgcagtggtcagcaggcttgcaggccccagtgctgaccgctccacctgcctggaggccaccccccacttctcccctcagtctgcttttctcctgctcattggctgtgtgccaggccccgaggtaactgttttacacagataaactcaccagtcatcacaaggaccccaccatgcaggagaaactgaggcactaaaaagtgaaatctccatccaaatccatactgttagtaagggctggacgtgccattatttggtttgcttatctactgaccagctccctgtgcactgggtgcttcctgcctagaacactattcactcgcgctgctcagcccctggcctctcctgtctccaccccttctcagactctgctccccttggtgggccaccccacccccaccttggcggtcttgatgatctcggtgaagttgtccatgatggacttaatgtcgtccttcagccgcttgttgtaggactgcagcagcgtctccttgctctggggcagggctctctgctgggccatggctgagcctcaagcagcgcagcggggagacctgggacctagagtgcagcacagacctctgagtgcaggcagagtctaccccagccaccctctatgccccaaccttagcagaacacgcagatttctggggattccctttctgccaaataaagtcaatcactgaaacacagatgaactcattccatcagcagacaccgcagggggtgccaggactggccccgcctttgccagagcaagctcatcctggaactcctggccagccctccaagccctgtccagggctccagtccagacttcacgtccaggcccacagcgtgtcccagggagccctgcaaactcaacaccagctccccgtccccagcccttggcttaacttcttagcccgccgccaccttcgccacgccctcccatccgaagagtccttccaattcgacccctctgcaccgcctacatccacgctttccttccactcccactcaggctgccccgctccagacctcatccctgcactgcgggccccgctccctccagtctctgcgcggcagggaagaggtcctaaaaagtggtcattccaaccgggcgcggtggctcacgcctgtaatcccagcactttgggaggccgaggcagggatcacctgaggtcaggagtttgagactagcctgaccaacatggtgaaaccccaactctactaaaaatacaaaaattagccgggcgtgatggcaggcgcctgtaatcccagctactcgggaggctgaggcaggagaatcgcttgaacccgggaagcacaggtcgcagtgagccgagatcgcgccactgcactccagcctgggcgacagggggagactacgtctccaaaagaaaaaaaaaaggggggtaattccactccctcgcttaacatccctcatggttccccggtgcgccgggacaaggggctcaagttccgcgccgcgcctctcggcctctgccctccagccgcactggacggcctcggcgctggagttgcctggccctggggccgggcctttgcgcgcggtgctcagggagggcccggggccccctaggttcggagtctggcgcacgaccgagcggactcctggacgcactcgcattgtttgtgcccatttttggcggggtgtgggaaataagtcacacgcaggaaaggggatctccgaccccagcgcctacgcacccacccacccccactcccgcccacacacccaccccccctccatccccaccccccaccacaccctcatacccgccccagcgcccgcacaccagacgccgcgtccgccgggtcggcctagggcggggtggtcaagtgcctctgcgacccgcactttcccgcgtctctcccacggcctggccctcccgccgcagtctctcttccccgccgcgccgcggtccgaaaacctagtcagccgccgcagcctctcagccccgcctcgatttttagctttataggaatgctgttgctttaaatccgaaatcccgtgccggtatcaactctcgcgatctccgaggccgcatacatattacccacaattccctttcctttctctctcctcccgccgcccaagatggtgagtgagctgtagttccgtggcactatagccaggttccggctgtatccgctgccatcctcctccaggcgcggcctcggagggcctcctgctcctcctggcgctaggagagccccactcggtgtggcacggagacaccgaggtggattagagccccacttggtgtggcacggagacattgagatggactagagccccgggcggccgagagcggaatgcgttgttcccggtgtcgcagggctgggtgtcgcaggcctggagcaccgcagtgcggggctcggagccctagcgtctctcgggcttgctgggggccgctccagaggccttgtgagcgacgagttctgagcccgcccctgttgcttctagagcctgtggggccgcgactcagaggagtcatgagtccggggtgtctcctgggtgggcgacgcgaagagagcgtggtctcgggcttagccttgctctggccactcggggttcccggggctgcatgcttgtgcggctgaatgtgagatgctcctgtcgaggggtggtgctggggggttgcagaaagctgctcgccagcttagttcaggcaggtgctgtcagcgtcccttgttttggaggagccagcctgagccctacccccgacgaagcgagtggaggcggcggtttaactgacgttttctttctgcccagccgaaaggaaagaaggccaagggaaagaaggtggctccggccccagctgtcgtgaagaagcaggaggctaagaaagtggtgaatcccctgtttgagaaaaggcctaagaattttggcattggtaagtaacaaacggcagaatgaaaacggtctatgtttttctcaagggaaggtggtaattgggttgtgttgtatcttgtaggttttagtgggtgtaaagtggtcgcagtccttaatttgtgtctcttagagacgggggcaatgatacatgcttcttgctttcattgggagttgctgagcgagcattcagctcaatatggtagtggccttgaattcagcttagccatctggaaacaagtacagtagcagtgtcgcagcgaggtactaggactgcaattctgctgtacttcgtggcaccttggcttcttgttagatgaggaaaagcatcgtgctctttgttctcaggtgtttgtgtgcagatgatgtaaaagaatatttgctatctgagagatggtgatgacattttaaaccaccaagatcgctgatgcaccaacacccttcctagtggccccagacatgaacttgacatggaatttgagcctcactcggtgtcaccctttacttctcaggacaggacatccagcccaaaagagacctcacccgctttgtgaaatggccccgctatatcaggttgcagcggcagagagccatcctctataagcggctgaaagtgcctcctgcgattaaccagttcacccaggccctggaccgccaaacaggtgaggttctgtggcgtggaaaggagtttctcaggcaaggattccttatttcatccagaacatgagggggatggtcttaggcttcttgaactgcagttgtcattaaattatagtcatatagcaggaccgcagtccagcatttgttattaagtgttaagtgacaaggattagaaccttgactccaagcctaaactgaagagtgtttttccagctactcagctgcttaagctggcccacaagtacagaccagagacaaagcaagagaagaagcagagactgttggcccgggccgagaagaaggctgctggcaaaggggacgtcccaacgaagagaccacctgtccttcgagcaggtgagtaggccccaccttagggtgaacactgggggcgggctgttgcagtgatgtaaaatttcttggcctgaaattactgtgaagagtaaaaccgagctttttaacactgagtcagcagctgagcccagcagcttcttgtgactagagcaggccctgtgagtgctcacaaagtggttgtgtgttctaggagttaacaccgtcaccaccttggtggagaacaagaaagctcagctggtggtgattgcacacgacgtgg

SEQ ID NO: 360 - DNA, 52903 bp, Homo sapiens
cctttaattggccaaaactgagtgactggcacaagagtaggttatggttggtttacacacccagttaggttacagttcactgtgcacagagaaacctttaggtaaaacttagactctgtaagaaggcatctttgggctaaacttaatctaacagtcttttctttctgtctgctctcagcccagtccttgccattctcagctctgcttcgggtcagaggaaactacattttccagggccacttgttttctggtttctaggtggcctcagtcaatggaagtctgagagaagactgaagtgggcgggagagaagccagggcacttctctctgtcctctctctcttcttctgataatgagtgctacgtctccatggctcctgttcctgttagtctttctctggaatccaagccatggttcatcttctacaacgtggccctggatcctgggctctggtaacattatctctgtttctccagtcctaagggtagtagtaactcctactgttgctaatctctggtttactttgcctcctaattgtcctcttactttttccatcacctctgtaagcagttactatggattgaattgtttccccctaaaattcgtatgttgaagcccccattgtggctgtatttggagtaagaaagtaattaatgttaaataaggtcataagggtggaaccctggactgataggattattgtctttataagaagacaaaacagagtgtacactctctctctctctctttttaccttgtgaagacacagcaagaagtagttcaactgcaagccaggaagacagcccttaccaggaactgaataggccagcaccccgatccttgacttctcagactccagaactctgagaaaaaaaattctgttatttaagctacctagtcaggtgtattttgttatgacagtccaagctaatataggagttcattgtttgaaatagctgacgtttttccatcaaccctgactaatacaagttctttatatcattgataccatataatatttgttgatcctgtaatatgtagccaacattatgcaaaagacatgttaatattcattttctcatctatcccaataacaccgtaacatatgacaaaatggtatgaagtaaaaaacatggattttgagttacttagactgcatcacaactcctccacttactagctgcatgacctacgaaaagttaaatctctctaggccctgctttccttatctgtaaattggtctagtaatagtatcaaactaagaaggttgttctgaattaaatgagttactctatgtaaagtacttagaatatatgtaggcatacagtacactctcaataaatctattatttttagctgcaatttgttaagtgcctattttatgccaagcacagcaataggtactggagaaataaagacaaataaaaaactatcaatgccttcaaagagtttgaggatgctaacagaggcaaacacatgaatgggtaattataataaaatatggcaagtttattgataaatttattatgggaaagctaacatgatcaacagtcagggattgggacacatttgacagggtttgattcccagttctgccaattactaattgactctgagcaagatatctatctcctctgagcctcaatgttcttacctgtgaaatgggaatgataatagtacctacctcataaggatatagtgattaaaaatgagataataaaagcacagatttgggtattgttcctggaagttgacatgtactcaaagaaggatagctttttttttttttttttttttgagatggagtcttgctctgtcgcccaggctggagtgcagtggtgcaatctcagctcattgcaagctccgcctcccgggttcaagcgattctcctgtctcagcctcctgagcagctgggactacaggtgcccaccaccacgcctggctaattttttgtatttttagtagagacggggtttcaccatgttagccaggatggtctcgatctcctgacctcgtgatccatccgcctcagccttccaaagtgctgggattacaggcgtgagccacctcacccagccactatttttatcattaatacggaagcatagaataagggtgcctaacccagcccaaagctcccccaagtttcctactgcttggcagccactctaatctgcttgacaagaactgctcttaatgtttctcctcctcagaagatgagactgagtctcttatacttttccagtatcagcataaattaggacaagaactttagaaaggctgggcgtggcagctcaccctgtaatcccagcactttgggaggccgaggcgggcggatcatgagttcaggagattgagaccaccctggctaacacggtgaaaccccatctctactaaaaaatacaaaaaattagccaggtgtggtggtgggcgcctgtagtcccagctactcgggaggctgaggcaggagaagggcgtgaacctgggaagtggaggttgcagtgagcagagatcctgccactgcactccaccctgggccacagagcgagactccatctcaaaaaaaaaaaaaaaagaaaaatttagaaaatttcttgacagaatctattaaagctaaacatatgtatgcaaagcagttccactcctgcatatatagccagaaatgagtacatatatgttccaaatgacatataaaagaatgtttatagaagctttactcataattgtgacaaactgaatgcaaactatatacccatcaacagaagaatggatatatacactgcgatatattcatatgcaatgaaatgctacatagcaactagaataaactacagctacatgcaacaaatagatgaatctcacactcaagatgttgagtcaaagaagccagggtgcacactttattattccatttagagaaaattcatgaacaggcaaaacgagtctatgtcacagaagtcagaaaagtggttaccttggggaggagccaagatgtccgaataggaacagctccggtctacagctcccagcgtgagcgacacagaagacgggtgatttctgcatttccatctgaggtaccgggttcatctcactagggagtgccagacagtgggcgcaggtcagtgggtgcgcgcaccgtgcgcgagccgaagcagggcgaggcattgcctcacttgggaagcacaaggggtcagggagttccctttccgagtcaaagaaaggggtgacggacgcacctggaaaatcaggtcactcccacccgaatattgcgcttttcggaccggcttaaaaaaacggcgcaccacgagattatatccggcacctggctgggagggtcctaccctcacggagtctcgatgattgctagcacagcagtctgagatcaaactgcaaggcggcaacgaggctgggggaggggcgcccgccattgcccaggcttgcttaggtaaacaaagcagccaggaagctcaaactgggtggagcccaccacagctcaaggaggcctgcctgcctctgtaggctccacctctgggggcagggcacagacaaacaaaaagacagcagtaacctctgcagacttaaatgtccctatctgacagctttgaagagagcagtggttctcccagcacgcagctggagatctgagaacgggcagactgcttcctcaagtgggtccctgacccctgacccccgagcagcctaactgggaggcaccccccagcaggggcacactgacaactcacacggcagggtattccaacagacctgcagctgagggtcctgtctgttagaaggaaaactaacaaacagaaaggacatccacaccaaaaacccatctgcacatcaccatcatcaaagaccaaaagtagataaaaccacaaagatggggataaaacagaacagaaaaactggaaactctaaaacgcagagcgcctctcctcctccaaaggaacgcagttcctcaccagcaacggaacaaagctggatggagaatgactttgacgagctgagagaagaaggcttcagacgatcaaattactctgagctacgggaggacattcaaaccaaaggcaaagaagttgaaaactttgaaaaaaattttagaagaatgtataactagaataaccaatacagagaagtgcttaaaggagctgatggagctgaaaaccaaggctcgagaactacgtgaagaatgcagaagcctcaggagccgatgcgatcaactggaagaaagggtatcagcaatggaagatgaaatgaatgaaatgaagcgagaagggaagtttagagaaaaaagaataaaaagaaatgagcaaagcctccaagaaatatgggactatgtgaaaagaccaaatctacgtctgattggtgtacctgaaagtgatggggagaatggaaccaagttggaaaacactctgcaggatattatccaggagaacttccccaatctagcaaggcaggccaacgttcagattcaggaaatacagagaacgccacaaagatactcctcgagaagagcaactccaagacacataattgtcagattcaccaaagttgaaatgaaggaaaaaatgttaagggcagccagagagaaaggtcaggctaccctcaaagggaagcccatcagactaacagcggatctcttggcagaaaccctacaagccagaagagagtgggggccaatattcaacattcttaaagaaaagaattttcaacccagaatttcatatccagccaaactaagcttcataagtgaaggagaaataaaattctttacagacaagcaaatgctgagagattttgtcaccaccaggcctgccctaaaagagctcctgaaggaagcactaaacatggaaaggaacaaccggtaccagccgctgcaaaatcatgccaaaatgtaaagaccatcgagactaggaagaaactgcatcaactaacaagcaaaataaccagctaacatcataatgacaggatcaaattcacacataacaatattaactttacatgtaaatggactaaatgctccaattaaaagacacagactggcaaattggatagagtcaagacccatcagtgtgctgtattcaggaaacccatctcacatgcagagacccacacaggctcaaaataaaaggatggaggaagatctaccaagaaaatggaaaacaaaaaaaggcaggggttgcaatccaagtctctgataaaacagactttaaaccaacaaagatcaaaagagacaaagaaggcccttacataatggtaaagggatcaattcaacaagaagagctaactatcctaaatatatatgcacccaatacaggagcacccagattcataaagcaagtcctgagtgacctacaaagagacttagactcccacacattaataatgggagactttaacaccccactgtcaacattagacagatcaacgagacagaaagtcagcaaggatacccaggaattgaactcagctctgcaccaagcagtcctaatagacatctaaagaactctccatcccaaatcaacagaatatacatttttttcagcaccacaccacacctattccaaaattgaccacatacttggaagtaaagctctcctcagcaaatgtaaaagaacagagatgataacaaactatctctcagaccacagtgcaatcaaactagaactcaggattaagaatctcactcaaaaccactcaactacatggaaactgaacaacctgctcctgaatgactactggatacataacgaaatgaaggcagaaatgaagatgttctttgaaaccaacgagaacaaagacacaacataccagaatctctgggacgcattcaaagcagtgtgtagagggaaatttatagcactaaatgcccacaagagaaagcaggaaagatccaaaattgacaccctaatatcacaattaaaagaactagaaaagcaagagcaaacacattcaaaagctagcagaaagcaagaaataactaaaatcagagcagaactgaaggaaatagagacacaaaaaacccttcaaaaaattaatgaatccaggagctggttttttgaaaggatcaacaaaattgatagactgctagcaagactaataaagaaaaaaagagagaagaatcaaatagacacaataaaaaatgataaaggggtatcaccaccaatcccacagaaatacaaactatcatcagagaatactacaaacacctctatgcaaataaactagaaaatctagaagaaatggataaattcctcgacacatacactctcccaagactaaaccaggaagaagttgaatctctgaatagaccaataacaggagctgaaaattgtggcaataatcaatagtttaccaaccaaaaagagtccaggaccagatggattcacagccgaattctaccagaggtacaaggaggaactggtaccattccttctgaaactattccaatcaatagaaaaagagggagtcctccctaactcattttatgaggccagcatcattctgataccaaagccgggcagagacacaaccaaaaaagagaattttagaccaatatccttgacgaacattgttgcaaaaatcctcaataaaatactggcaaaacgaatccagcagcacatcaaaaagcttatccaccatgatcaagtgggcttcatccctgggatgcaaggctggtttaatatacgcaaatcaataaatgtaatccagcatataaacagagccaaagacaaaaaccacatgattatctcaatagatgcagaaaaagactttgacaaaattcaacaacccttcatgataaaaactctcaataaattaggtattgatgggatgtatttcaaaataataagagctatctatgacaaacccacagccaatatcatactgaatgggcaaaaactggaagcattccctttgaaaactggcacaagacagggatgccctctctcaccactcctattcaacatagtgttggaagttctggccagggcaattaggcaggagaaggaaataaagtgtattcaattaggaaaagaggaagtcaaattgtccctgtttgcagacgacatgactgtatatctagaaaaccccattgtctcagcccaaaatctccttaagttgataagcaacttcagcaaagtctcaggatacaaaatcaatgtacaaaaatcacaagcattcttatacaccaacaacagacaaacagagagccaaatcatgagtgaactcccattcacaattgcttcaaagaaaataaaatacctaggaatccaccttacaagggatgtgaaggacctcttcaaggagaactacaaaccactgctcgaggaaataaaaaaggatacaaacaaatggaagaacattccatgctcatgggtaggaagaatcaatatcatgaaaatggccatactgcccaaggtaatttacagattcaatgccatccccatcaagctaccaatgactttcttcacagaattggaaaaaactactttaaagttcatatggaaccaaaaaagagcccgcatcgccaaggcaatcctaagccaaaagaacaaagctggaggcatcacactacctgacttcaaactatactacaagcctacagtaaccaaaacagcatggtactggtaccaaaacagagatatagatcaatggaacagaacagagccctcagaaataacgccgcatatctacaactatctgatctttgacgaacctgagaaaaacaagcaatggggaaaggattccctatttaataaatggtgctgggaaaactggctagccatatgtagaaagctgaaactggatcccttccttacaccttatacaaaaatcaattcaagatggattaaagacttaaacattagacctaaaaccataaaaaccctagaagaaaacctaggcagtaccattcaggacataggcatgggcaaggacttcatgtccaaaacaccaaaagcaatggcaacaaaagacaaaattgacaaatgggatctaattagactaaagagcttctgcacagcaaaagaaactaccatcagagtgaacaggcaacctacaaaatgggagaaaattttcgcaacctactcatctgacaaagggctaatatccagaatctacaatgaactcaaacaaatttacaagaaaaaaacaaacaaccccatcaaaaagtgggcgaaggacatgaacagacacttctcaaatgaagacatttacgcagccaaaaaacacatgaaaaaatgctcatcatcactggccatcagagaaatgcaaatcaaaaccacaatgagataccatctcacaccagttagaatggcaatcattaaaaagtcaggaaacaacaggtgctggagaggatgtggagaaataggaacacttttacactgttggtgggactgtaaactagttcaaccattgtggaagtcagtgtggcgattcctcagggatctagaactagaaataccatttgacccagccatcccattactgggtatatacccaaaggactataaatcatgctgctataaagacacatgcacacgtatgtttattgcggcattattcacaatagcaaagacttggaaccaacccaaatgtccaacaatgataaactggattaagaaaatgtggcacatatacaccatggaatactatgcagccataaaaaaggatgagttcatgtcctttgtagggacatggatgaaattggaaatcatcattctcagtaaactattgcaagaacaaaaaaccaaacaccgcatattctcactcataggtgggaattgaacaatgagatcacatggacacaggaaggggaatatcacactctggggactgtggtggggtggggggaggggggagggatagcattgggagatatacctaatgctagatgacgagttagtgggtgcagcgcaccagcatggcacatgtatacatatgtaactaacctgcacaatgtgcacatgtaccctaaaacttaaagtataataaaaaaaaaaaaagaaaagtggttacctttagggaaatatttacagagagggcagtatattggtaaatgtttatcaaccagctctccagaaaagaaagaaaagaaaagaaagaaaagccctgaatttacagcatttgttagtttctatggcataaatactccgagcatggtagatttcaaggtaccaatctcatgttactgaacacaaagttgggaagaactttgtgtacaaaacttttgtgtatatgtgtacaatctgcttagcaagtctgtgtgagccaaatacaccccaccactgagaggtggcatgaaggagcattctggtgtgctagaaatattctgtatcttcttttttttttttttggagatgggggtctcactttattattcaggctggtctcaaactcctggggtcaagagaccctactgtctcagcttcccaagtagctgagcttacaggcatgagccactgtgcccaactctgatcttagtccttacacagatgtacatatattaaaagagctatactttaagaattatcgactatattgtatgtatgttatacttctatacaaagcaaaaatgttaaatatttctgagaactagaaagaaaaaaaagttacaactgttgtgtctgagaggaagatccagatgggtaccagagaagcaatggctgggtgctgggcactcagacctttttgttcatacaatagatatgcagcaaaagagagacatactattagtagctttgacataaatagaaaagagatggtgactcttttacctggatcattgtcaattattttaacattagacttgattcagtcttatcaccaatggttgatacatcatataaaagagtgtcgtttctgaaaagccccagatccactgtcttaactatctatggccctgtcaccttagagatgattattccactgggtggctccagaagaacattttaagcactgtagcacctgaatacaatgatcagacatagaaaagcaccaacgtaaacagttacttttattttgagtaaaaatacacattcatatcattttcccttatatccctcaaatcttaaatgtgttcaatatgtctagaagatatctgtggtctagctagccgagacattttaaaaagacagctgctcctgacttatatagcacttacatatttaaatttacaaagccaaagcaacattttaaaggggtttgactgacgataggttgatgcatccacagattcatttgttcccgatctggcaatacaggaccatagaaaacaccaaacccagtatctagagaacaaaataacaggattaacatggaatttaagggaaaacactggacacattataaataaacagaaagaacattatatatgaaaagattttgtatattgacagttccaatcttatctaactcatctctcttgggaaattagaggttccaatgggacaaaagagcactgcaaaagctctcttgagttttttttgtgttttaatcagcttttttagctggccaatcagcctctatctaactggccccatataaactgcacagtagcagctgccaccagaggacctactcccttttctggaacacacacattcttctgcagagcgtctcctctggagcactggggatctcaggtccctgggggctaaatatacgtaatgcttccataaaaaggttatgatcatctggtttaaatcatctgcataaaaatcaagaagtctagaatttctcttgctgtagttttaggcatttccaagaggaataaaaaatgaagtaactctttttttaaaaaagcttctaaactatggggaacagcttaattcaggaatttcttttgaagtgaaaaagcacagctgaaaatctggggcataatttccatctcaagtagctctcccaagaatgagggaccccaaaatttgctctaattggctctacagttggtgacttgcatgctgtatctttgacgtagaaatgatagacaggacctgtgtgcattaccaatagaaagtttcctcccccaccagccccttttgaagggaggatggaggaaggcaaagtgacatttatgctgagtcaacttaaatgcttctactgtgttgagactttctgcttactaacactttcctggaaatgtaattcaaatgagaactgctaaccaatctttcttccttcttaaaaaggttgacaccaattctctgcaaaagtaataatttccattcaaaatgtgctacaattgaagactgaaatttagtctttttgtcttgatcctgagccttaagtctgtgggacaagtatcaagaaagaatttttttaatggggaaaaaataatgggataagacaactatcatctttcactgctacatccttgaaatagaagccgtcaatttatcagcagactagatagttaatatcacactttcttgtatttcattgtccctgaaaagaacatttatgattgttcaaaaaaaagcacataattaaaagagatttgtcattttataatgtacgccaagactcatgataaatttgctaagaggtatgcagcagtctaaaaaaatgtaaaattatcatttttcttttaactgctttatttctaggacctcctgttgggataacttttatcctacaaagtgatggctctcagtgtgtagcacttttttttttttaattaaagcaaggaaagtgctgatcatcttttgtgcttgtaagttgttatagtcaaatgaggagagtatgatagtctggctgttttaagctagagtaatgagaattccaaaaatgtctatagataaatttttcttgcagaataaggtattctgcacaatctttagcatccaatgtgagaagaatcccttaggtatatagtcttaacatagctttgaaaacaaatattggcccacctcactaaaacctatgcctaaacatactaacataaggtctaaatatggggcggtctttttttatatgatatttttctgtggagataatctgaacatattttctgcaggaagacatttgcttctgttttcttaaaagtattttttagaggagattttctgtttctgtatctttgtgtttttttgaatttgaactttggaaacaaagaagggagataggcctaagtcatagggcaataggaaacttgtactaatgactgtaagatgagctataaaatgctttgtttttggatacataatttatagactgggtgtcagaagacttttccaatctactttttgaataaaggaagatggaatataaaatgatttgtttcccttaaaaagagggagggcaggttatagactgaggaactgaacaattttaaaaagttcaaacaattatttgaaccaactatttaccatatctgcagagagtctagaaatcacaattaatttgacttctcgaattcaaaaacggttctgttttatgatagtaacgcaaaaacttcatacctataaattactgtatagaatgtttgtattaagctatttttctctgaatatgtctttagaagaacaaataaaatatttaaacatgtaattaatacatggaatataacaatttcataaaatactgaaatacattaatctttttgtaatcttattttccactagatgtatttaaattcttgaaaatgcctttgactatgacacaaaggatttcatcaacctccccaatcaagtatgtccttactttttctggttttgctaactgaggagcatctgtgatttgagctagtgatagtcaattgtcagaacttgagtctaacatgaaatataactcttatattaaatatctcatttaaagcatgctctctcattcacttaaatcattcatgtaaaatcactcttgattcatttaaatcattcatttcttactcatcttcatggccattagtccttatttctaaattagcataaacccagaatacaaagcagagaaataaaatacatcttacaaaatgcagaatcaagagaaatagacctaatccatagcaccatttgactctgaacatatatcagacctaaagaaagacagccataacctaccaacaaagaatgcttcatatttatacctattcatctggactacaagaaagtaataacccacagtttaatttgctgctaatagtccctaacctttctctaatagctgcctgggaaattccaccagcaaactaaataaccacttaggacactaaattgcttcattcccagttaaaatttctttctggcagtgatgtggcacgagtaagaggtagaaaattaccagaaagcccaaggagtaccttgcacagcattccatgagtgtgaagcacaaggcactcagctgagctaaccagctctcacaggcattaaccagggagacacttcacattcttgctaatgccctggaataggattgtgagtgaatttgatctacttgatattaaaattacccaagatctgggatgattccaaaatgcttctctgaagcagttttaattcattttcttggcaaagatttttaggccatgtgaaaagtatctttcaggttttttttttttttaaaaaaaaaacatgccaagaaagttcatcaagacaaaaatcctatgtgggatatttttccaacatcaataattaaagtgatgaaagtaatacataagcctcaattttccttgaaaatttctccaagtgagtcaatagtacttaagctgaggaaatcagagacaattacctctactttttagaacttcttggatttctctagaatgtaataagtaacaaagaaagagctcctcacactcttgagttcagtttttattttctgtttcaaaatcaagatgagaaataagaaattgtaaaggtcgtattttgctttgtttggtgctttttcttctaactttggaaaactgtaacccctgtgctagttttcagtgggaaaaatatacctggcactaagaactatgtgaaaattaattctatctttttcccggtagagaggtcattcagaagcaagaatctcaaccctgctcacttcataagactggaatctccccctcagactcaggctgatcgagggagatgatgggcctttagcatccagtgcttttctaaagcatctgcgttttttatggttgttgtggtttttttttttctgtttgtttgttcaccatcaatatttcttgaaattaatgaacaagcaagggaataaaagagtcaataatacaagattatactgtacctcaataactgccagtccaaatgatattccaataactataatcaaattttttgccaagaagtcttttatgaaagaaatacaggtctgttaaaaaaaaaaaacattaaaagttacctctcagaaaaattcgaccttatattaatcaaaatttttattaatctggttgactttttacattgctatcaagaaacacacttaacgacaaggaactgggttattccttccactccctgcttcacctttgctccaaaaggttgtaactgttgtggtttgtttatacattgaaaagcaattgaggaacaaaattttgcttgactgcctaattgttgaatctagggattaataattacaaataataatttttcaccaacatatcctcaaatgacagattttataatttatactataaattttatagctgataaagctatatattttacaacataaaagtataaatcataattttatcttaactttattcattttagagctgataccaccttgactaaggattttttaggtttgtaatctaaaacagaaaggtttctggttgagattttagataataatattgtaaattttcatttttaaaacaaggtattttctttttttctttctttctttttttttttttttctttgagacagggtctccctccagcgctgaagctggagtgcagaggcgcaatcttggctcactgcagccttgacttcctgggctcaagtgatcctcccacctaatcctcccaagtagctgagactgcaggcatgtgccaccatgcctggctaatttttgttgtgttttgtaaagacatggttttgccatattgcccaggcttgtcttgaactcccgggctcaagcaatccaccggcctcagcctctgaaaatgctgggataacaggcttgaagtcactgctgccggaaaaaacaacatattttcaaaatcccttaatatttatcagggttatttttatcttaaaaagaaaaaacttactatgtctaccactatgccattactttagataaaaaagagaaattaggaagttgcctctctgctacatttttgaaatgtatacaatccaggatgcattttcatgcttaaaacattttggactagacctaataacttcaagaattgtaaattatgtgaagaattttttaaatggaaaaagactacacagtataattgtgttatttttgtactgccctgaaatatattatccctttgatggtcatatatgtgcaaagggctaacaaagtattgctatttgttaaataaaataaaatttctccagaaggctaagtcatctttccccttcattcctgaatgtattgagtttcttcattcacatttaacccaacgtggtaaacattcaaggaaattattatgtcatttaggttaacaatgagattaatgattatatctactgagtcacattcattatgtttcaggggtttttctcttcctctttgcctaagataatgagggtatcttggcaaaaggaagaggaaaaaaaagaaatgtgaattatggccattccatattttttattttaccagacttcttgcaaatgacacatggcagatggaagtattttatgaatttacaaccttccttttgggaaactggtgtagctatcagcctatattcagctgaattatgtgtgaacttacagaaactatctaatagtttttttagaataattccaggggcttttcagaatctgtcttgaggaaaaacatctttcagttgaatttgaacaggagacaaatagcaatctgcaattgaatttacttatttcctcattatcctaagtggaaactatttttatttactctatatttatttccccttttccttgtaaatactgtgtcactaacattaggtagggaggaggggagcagggagaatataaaaagtaagaatcaaactttttttagtaatattactttgacaatgaaaaacgcaatataacctgtagtctggtagattatttattgagttactttaaatcttagcgacatactttaagtattaatgacagcaattccccttcagggcagagcctctttaattttgataagatcagtgaaaaagatcagtagtcaaggaaagggtagtttcccctgagatactttctatttccttttataaattattttcagtagcagttactaaaccaaaacatttctagattgaaaagaatcttcgggtattatagatattaatattaattcattgtgatttatagtggtttttaatgtatctgcctctcaactagattgtaatctcctagaggatccagaagcatgtctgatcctagcaagggtctgtctgacatgtagtaggcactgaagaataacagtaaataaatgaaatactaatatcaattgtaatttttgtacacatttcttctaagcagaacgaacaacttatgaagggacagatgtcatgttcttcatgaagccatatcctgaaccccacagactaagtgagatggggtcccataacaccttgcacccatctctatccaagagatactagtagaccattggattgaagttgcctaactatctttctctcttccttacttgagcatcagctccatgagcgcagacattgtgctctgttcaggaatgaattcccggtgactggtagaaagcttggcgcataggaggtggtcagtaagtatttgatgaactgatcaataagaagaactaggacatccatgtattgacattcacaagtcacataaatatgacatctacaacacataaaagattaacctatctttttcaattgacattaaatgttcaaggtaacttctcaattgcagcaataactaggtaaattggtagctgtcagtaacatagagaacctaaacccttaaatgtatttgggaaggacttggagtcctttctttaaattttgggaaagaagaaacctcatttcttgagaaaaggaaatttgattagaaaacaaaaaacattgaaaattgtagtgaaaatattgttttctagaacttatgttaaagtaggaaaaaataaaagagaataatgattaagatgaccaaagagaggataaaataaacttttatgttagtttgtactttgcctcccattgcagtagaatgtttctttgacctattaatattgggcttaaatgatgccagactcatagaagaaatgaagtctatctgcttttatctttaaataaggatttttttaatttgggaaatttctgagatttttatatcatgattcccatggtactccatgcattttaattttttgtagggactttaattgtgaaaagaaagtaacagaattgcttattgtaccaaatgtgatttagttctcacctctttgtaaacttgttttccattatagctttggcatggtctctgcttatctagacaggcacataattcaggatagtgttgaaaattatttccccaatcagcagctccattgaccaaaccgcagcatttaaactgtttgataaaaggtagaatgagaagcagtcagtaagaagattaaaaacattggcaatacattaaattataatcttctgaaatcattattaaaggttattatgctaaaataccatgtaagtcacctttcacctttctctgtgtagaagtaaaaattaaggatttttgcattttgatctttacattaatgatggaaaaatggagttgcagactcaaaaatctgaagaagttgggaagatgaaaaactcacctactaggttttttatttttatttttttgagatggagtcttgctctgtcaccaggctggagtgcagtgacgcgatctcggctcactgcaacctccaactccctggttcaagggattctcctacctcagcctcccgagtagctgggattacaggcatgctgcaccaccacgcccagctaatttttgtatttttagcagagaccgcgttttaccatgttggccaggattgtctcaatctcctgacctcgtgatctgtccacctcagcctcccaaagtgctgggattccaggcataagccacggtgcccagcctcacctactagtttttaatgacaaaagagagtcagatctctgtaatttagatattgtcaaaaaagtttccaaagaattcacaagagagtcaaagaattgttgctcaaaagagacatgaagttttaaaagtgaaatttccactccatgatctctgatcacttttgaaagacaggaggaaaaaaatgagagatattgcaaagacccaaatagatgctcaaggagcctcccataagattgaattttatgaacatctttaaaatatgggagggaacacaaatgaagaatgaagctcttagaatgtcaggaaagttacagtcccagaataaactgatccatggaaaacactaaaaaagagggtttgcagccacatttgaggaagaaaaacaaggaaatgataaccccaagaatcagggcatgtggcacatgatattattagatgggagaaagaaagataattatccctcatgttgcttccatctgctcaattaaggggaaaacacttcgtgcagaaatgggaggaaaaaaaaatggctgagaaaaacagaaccaagactgagtggttttcccagctctgatacattgcaatgccaagatattgaaagaattttcacttactgggcaggtaatcattaaatttatttattacattaataataaatgtgtaataaaatcatttattacacattagtttaacctctgtgccaaagtttgttcatctgtaaaatacagatagtaacagttgctaataatagcatttaatttgcagatttatcataaagataaacataagaaaatccatgtaaagataagaactcccaggttgaagaaagcactcaataatgcatttgcttttattgtttttgttttcattgtttgctgttggtgttgtttctgtcatgctctcacaggaacatgatctgttcagcattgttatcaatgatttgaataaatagaaaaaaatatctttccaattctgtagtttctgtagagctaggaatgacaattaatatgctggagatcagagtcaaatttcaaagatagttcaaataacagagataaactaacaaattcaactgaggcagatacgaagtcttgtacttatgtccaaagactgagttacacaaaaacattactcaacagatgtttatatgacaaagagctggaaatttcagtttgtttcaaggtcagtactagcaaggagggtgctcttgaaacaacctcctttcctgttcccatggtagacatgattaattgtttattctttctgattacataatcttgagtagtattcactgatacagataccctctgtcaaatgtaaattaaattccactataaaatttatattctcatttacagatcggttcatatttggaatattgtagacctcaggactccttagggaggcataaagtcatactcatagatgagagggtagaagttaggaaggttaaaacttgtcacgatatcaagtcactacatcagagataagagcagttaaagaagaagctggtcaggacttgttgacagtggtgtaacagctggatgaaaaaggcagtaggcactaatgatacaacgcctctagacaaataataatgagcaagaatccgaaaggggtgcattccatcagtatgttaacagggaatttgtgcgggaaatccctgaaatccaaagagaaagccactcagcatctgtagcttttgtcaatgtgttatgggactccaggtcatccagccagagtttgtggtggtaggattcttttcccaaagaagcataacttataaaagaaagcatagtggagatggaggaggaggataaggatgaggaggaggaggaggaagaagaaggaggaggaggaggaggaggaggaggtaagaagaggaggaggagaaggaagaagaagaagaaggaggagggggagggggaggtggcacagggaagaggagaaggaggaggaggaagaaggaggagaaagaagaagaagaaggaggaggaggaggaggagaaggggggacaagaagggagagcaggaggaaaacaagaggaggaggaagaaaaagaatcagcagaagaagcaggagaaaaaagaagaaggggaggcggaggagaagaaaaggaagaaggaggaggagaaggaggagaaggggaaggagaaggaaagaaggagaagaaggaggagaagaagaagactcataatggaaatttgaagaaatatagtcctaggaacacaaggaacttcaggcacaggatttctttacaagagcaagagcacttcaggagaacatgctacaacaaacagcacatttagaaacccaggattggcatggagaccttgaatccagggatacgtgcagcagatgttactaggacccaaaccagaggctcagtgattacctctagtctattttgtcctaggtcatcaccctgggaagggtctgggatgctcagccccacccagcagaggtactgaggctgcataaattcttccttctttaagcctgttttaagctgggctctagagtaagaatgatcccggaaagaagagagtcaaaggatgcagctacaggggagctaggaaaagcacatcagaaaggaagttaaacagggactgacccatatcaggtttcagctttcggaaatgatgctttaagcacaatttttacaagctggcatctacccaaataggaactagtgaatgctctgagggagaaaaaaaaaagtcacctgataaaaagtttgagaaaccaaggatgtttccacttgaaaagcaaggattttaggagtcgaacaatagccattctcaaagaaaaatctatcatatataaaagcatcaataattttttttcctctgaaactctggaaaaactagtactaaataatgtaaatcctagggaggcagattttgtttcaaattaagaaataacatactaatcatcagacttgcatataagcaggatgggcaaaaattagtaaactttcacctctttaatatttcatttgagggtagatgaccataaatataaaatatgtttatcagtgagaagtcagattaagtgacctataaaattcaagcctctcctaagattctgtgaatttccatgacatgcatatattcagaaggaaaaagtagtaagagcactccaaggatggaaactgatgcaaaggcaggaaggcagttgttcaagggaccctgagtacacaaacctggctggactagagtttactctttagagagtagtacttagtaaagttaaaatattaggtaggatccagagagtagaagaccttcaatgcctacccatattttgactttaaagaaaaaaggaggggatagtatactgatttaaaaaataacagactggtcagacagatctgggttcaaattccaacccatcacttggtagctgttagacctccctaaaacccaatatccttatctgtaaaatagggttaatgaggataatgatattacccatccacagggttgttgtgggtattaaatgagctactggatataacacctgctacatagtagcaattaatgttagctattaccatttttatgagacagagaagtggtggaggctgagaaagaaaaaaagagaggtggatgtggttgctcacgcttgcaatcccagcaatttgggaggccaaggcaggaggatcacttgaggtcaggaatttgagaccagtctaggcaacatagtaagacccctctctctacaaaaatgataattttttaaaaggtagccaggcatggtggtgtgtgcttgtggtcctaactactcaggaacctgaggtgggaagatctcttgagccctggtggtcaaaattgcagtgagctatgattatactactgcactccaggctgagtgacacagcaagaccttgtcctcaaaataattaattattttttaaaaagaagagagagaggccatgtgcggtggctcacctctgtaatcccagcactttgggaggctaaggcgggtggatcacctgaggtcaggagttcaagaccaaccttaccaacatggtgagactctgtctctactaaaaatacaaaaaatgagccgggcgtggtggcgcatgtctgtagtctcagctactcaggaggctgagacaggagaatcagttgaacccgggaggcagaggttgcagcgagccaagattgcaccactgcactccagcctgggtgacagagcaagactctgtccccccccaaaaaaaagggggagagagagagaaagagaggagattcccagacacactacccttttaaatggtaaatggaaaatattaaaactattattgatttgactcattcgaggcttaacctgtcataaatgtatcttcttaatttctctccttcaaaactgcttcagaactttgtatgaagcgagaaagtaattacaaatatcttagatttttcttattgcatggtgacagaataatcaatcaaaatctgcaaaatggagacatttttcaatctttaaggaagatgttaaaaactaaacaaacacagaagaactatgtccaactctttaaaatgaacaatgaattctaattacctcttcttgaaacacaattatggcttcctggaattgtttttcactttcccctgtggcgctcaaaagctttgtgttttcatagagagtttcattcacaatgcgatcagactgaaaattgaaaagtattttacattattcacgccacaaggtagtatttcaatttttcaaacttcttcaaaattttcaaacatctgtgcacacaccttagatttgaaaacagctcctaggatacctgtcgccacctgcaggagcaggatcagaagcaagcctatgaaaaactgaagaagagaaaaagaaatatacattatcctcagtgcattcagtaacatctggggacattctggcacagcacttctctctacagctgggattatatcacagtgagagtgtcagtcacactcttcatttattccactttttacttcaagctgaaaattttgggttcattactactcagaaaattgctccagagactgatcgaggaaagtggttcaggcaaaaaaattatcaaaacaaccattgatatctgtatgatattgactagagggaagtttgaaaacttagatgagtttatttgagtattattttactccttccctttcttcatcaaacacaacctcacacaaactcagaattggctttgaaacagcatctccactacattcagaatcacctggcatcttgttacatatatagattcctgaaatcggcttcagatatgctgaatcataagtttgaaggatgcagcccaaagacaattagctttttttttaaacaagctccttgagtaattaaattcttcaattgcaaatgaggccttattgttcaaaaagcaatcagtaggaatgttattagagtccctttaaaactctgtctctaccgtccctcacaataaacaaacagttttgaacatttttctcaggtactgatataatccttactttattagaggaataagtttagattagacctgataaacttttatgtcatatttgtatctgataaacacttgatttttttctaatatttttactatatccattttctactgtatatgttaaaagtgaatgcctgtgaattatccaaacccaatttatcctcctcaatgctctctaagagataattctgattatctcattcatttaaactttttttttagcatggcatgtagaacacctatgattttaccacaacccacacttggattcatcttccatcatttactggaaacagttttgccggtctcctgccatacccaaggcttctcagttcccaaacacaccagcactgtactgccacgttgtctttccggaaagcttttcctaccctcactcatacaaataccttattcacttctgccctggtttgaaaatcccatcccctgtcttgccctttgcttctggggccactcccactgtagctatttgcttacttattaaccttccctagtaggttctaaaggtcttatgtattatttcgcacaatatctgacacatagaggtatggcagtaatgttgaatgagtgaatgaatgaatggatgaatgattaaaatttgtctcctctcagagtatcctccagtttctaagccaaactaagccaaatctaagccatatcagcttccacaatcaaaccttctaaagagaagttggagttagagtttcatcaatcatggcacgttcttttaacagacaatagggatgggagagaatcctctggagtctgaaggttggacactgggatttgtttggagaactcaccaacagaagcatgcagcgactttcttttatagcaccgcagcatcccaggaagcccagaatcatgatgatggcacctacagcaatcaatatgtccacagcaacgtaggagctagagcctacatcttcagaaccaaaaatctgaagtaaaaaagagattaatggcagaaaatttatttccttgaagtttattttgctcattcaacaaatatccattgagtgcctcctatgtgtcaagtcctgtgccaggaccctgaaatacatcagtgatcttaaaaagtacaaatccttgccctcatggagctcacattctattgaagtgcttatatttttctaaaatgatatgatgaaagctgggtggaagaaatgtaataggtttttttaaaccgtatttttaaaagcttaggacagttacttttactcttcttgatgtaatctttggttcacatattttgtgtattctatataaagtgcattataaaagcatgtgttgttatggtttttaattctttaaaaagttcaagctctttaaactattgatagacacaacaatatgaattaatttcagagtcattatgctgagctaaagaagccatagaaaaaagtaaatactgtatgattccatttctataaagttcaatcataagcaaaactatggttataaaaatcaaagcagtgcttgactttgagcaaggcagaagggaaagcaagagttaactgaaaagggacatgagggaacttccatgggttaataaaaatgctttgtatcctcattaaaaagaaatccagttcctgatatttcatatctattttatctctttgttcccaaaagccatagtccatagagtcatctagaaactctattttgactgttagttaatgagatatgaagggaaaaaaaatcctagagccctttatagtgggtgggctacccatcaggcataattcagttctcccaacaacacacacatactcgtcttcatcaccctcataacacttagcctcagccacctcttgtcctcgataagtggatttatccagaagtaaatcacaattaaaaagtaaagccttgtgcgtgtcttatgcataaatcctatatgtagcccatttgccttctataacctctatctactgggctgtctctagatagagcactagttcctagactaactcgaaacctctgcctcccagaatgggctatatagcatgtaggtcagctcccttaacagtcaatacaaaaatgactgctatgttctaatgatatttttgtttctcaaggctttttaaatctacttattgcctagaggaaacttttattcaacagtcaataggaaggaatgtgctgaagttataaaagcattaaaacaaacatctatattttgtcagggtcctaataaataagtttgtaatcctggaacagtcacccaacctagtgggctccagtttccccatttataaaagggaattgggtcaacctctgtgatagccaaggcctcctttgtctctaaaagtctatgcttacagataatgtttcaatttacgtattttgaaagcttggttaagtcctaaagatttttgtttgttggtttttattgttttctcattaatattagagctaaaaaatcagttttgttaataaacaggcaggacattggaatcaaaataaatgtgacaaaaatagaagtgttaggaaactagctctatggacttcctgctaaatattgcttcactagaatattgtggccagtacaggcaaaccctatgagaggatggaagcctcgctagctgggttatcagaacttagaaaagatatgccagacatacaaataatagttcaaatatctacacatgaggccaagatagtgtgaccagcacttgtgcagcaggtagtgagacacttctatgaggctaacctgggcagggtgacccactgccagagactagccagaaagcagtgtgttgactgtctagtggtcattgttccaagtccagcccaacaagtggttattcttattcaagaatgaagtggaaatctgagttcagatgtttgcaccaggggaggaacagcagggtttgaaaagctgtcttgaatgaacactgtgtccctgtgtgtcttaggacaaggggagaatttctaaagacagagaaattcagctggtcctgaaagatgaggactcaggaatcctctttggatcagaagggacctcctgggacaaggatggctgctcatgtgcttttcctcatggtgctaagtttatcctgaggtagaaaaaagggtcttcatgagacacttcagcagaaagttctgtcatttccctgacatccttcttttctgtgtttatgctcatgtttttccttccaaaacagctacctctgttttttcactaacaaaaaattcagctctttgctctgtcttgattctttgtcactggcttgagaaaaatataaaccaagccaattttatataagtcaagctggttaatgttgtcctggcagacactggcttttgttcagtgtgagaggctgatgaagcgtgagtcaaaacgtaactaaagatgctgtctagctctattaattcattcttatccccagatgtggaggagcaccctctcaaggacaacagttcccctttaatacattcaatatgtgcaattttttaacagactaaacaccaaatttgtttaccagaagcactgggagggaaagaaaataccaacaggaagtaaaattaaaataaaataaattgcaggctacacacacatcttgaagaggccacagcaccctgtaagtaggtgactgttaatctctgtgcttaattatgagtcccaaagtcagacttcagattctacaggatggtaattctgcacatcttcaaatgcacttcttgggctcacacaccagagctccaggccatcaggaagtcacagttatggttatcagtagaaaacaataagtgaaatcctgatggactaggatgttactaaaaagctgccacacccatctcccacccaatttcttcaccatggtgaggcacagaatgtggaagccgctaattgccactgtgatcctctgggctccctaagggcagaaagcaattttaaaaggaaaagaacaacaggagagagagagaggaaaaaaacaaaaaaaaaaaaaacagagatagagtgagaaagaaattttcagaaaagccacccactgcagcgaagaaaacagagcagacattaattcccttttcatcttcctttccactaggctgtgttcaaaggcatttagctgcaccatggtgaaatacgttttagtagaaaatgcattgtcttaattgctggcttaataaatctctcagtaattatcaacttggaatcaaaattcttctcagagaggagaaactctctttatgtgggcaaataccttaaaaaggctctagcagtagaagaggtgatcctttagtggcaagagcccagaaaacaaagaacaaattaatggctctgaatgtgttagaataataatttgtggggatggagccccagaatagaagaagggagagaaaagaataaaagcacgggagccaggaaatggtgccagggtggtattatgttccgtaaaactgacagaacaatccccgcacactcgcccctccctcttcccccaaccctttccacatttgtgatactgtggcatggaacagataccacacgtatggggtccaatagctggagccagaattaaccatacgaaatacacttcctccagacctgtagatctgggtaagagctttggcactgggcacggaatggtgtgtgggggaggaaaatgggtcatgttcatcttatacatatagcaataatctggacatccccagagaattactgagtttcaccaagttagattagccactactggcaagtggttaccttcactgccagttgccacaggtaaataacaagtacccttgtaccttgttgcctttaaaatacagattcaaattattcttctccaagaaaacttctcattttctttccttttggaccaaccacattgggatcaactaaattattgtcaaaaccttctactataaaaattattcttcttggtgagaaggagaggtggcctatatcctcaatataggccttaaacaaatagtaaaggaggaaaatttccactttggccccttcccacctgcatctcactgaatttttttgaatttttgaataacacctcctccattctctagaaagatttttccacatctagcacagtgccagccacatagtaattttaattgattgaactgaattataaaatcacataacagcacaagtgattacatgaagcagttaagaaaaatgttttagacatgtttattactattattgttataactttcattattataaatgaaataaactacattggggaaagggtgacttgtttttgcatacttactgcttgagagtcattgcttactcgtacccatattgctaatgctaggatcaagataccacatagctgcagaaaaaaacaaacaaacaaaaagaatacaattaggatcatatgaaactctatttccacaccctcctatctatccggtgacagtagttcatcatcgactatactatcacaacctggaagacataaatgaggcatattcatatacagatcattgttgaaatgttaaattgcaatgtgtaagtttgatgagaataattctatttctcatccacaactcactcacagctctatggacaagaagttatttccattaggcctggaaagattatttttccatgtaactctagccctgtgtttctgctagattttagcatacaaaagaaaagtcacaacagtttaaagataaaatatccttatcatgcctctgggcttgtttgtgagaagctatgttggaccaggaaaaaagggaatgacggaatagtcaccattcatttaagattcgacaggaagggagatgttgggatagagggggaaaaagtaaaacatacgacaagatgtgcagttaagcaacaaggctatataataatcaacactttttgaacccaaataaactctcttaaaaacaagctcttttaggtggtaaagtttactcacagagaaggaacaatgaaagacagaacttgaagtcttaaattcctttaatgattttaccagattatttaatttggaccaatgccaacacaataaaatgtaaaacacattttactttagtgtaaggaaaactcttgtcattcagggtttaaaaaaaaaagttatgcattgtggcttcaaaaacaaaaatcaaagatctattattagatagagatgttaagagctgtgtctggtaacataccagacacagcaggccttgggggacttagtagacaattctgaccttgctgtgctctgacagacaaatgtccttggagcatcattgctttcgtgcatggttgagacatacgcctagaaccccaagacagcacttttaatggcttctcattgagtttgcaggggaaatagagtcaagggctctgttaaggaataggaagcacaatgagtagttgagtaaccatagactctgtgctccctaaaagaccttgaaaatcatctaggtctaaacctctcattttgaatggagaaattggaatcctgggcgctaattattacatcatgaaaacccggagcaattcctaaccaatctgcccttacaacatacttcagctcctacaaaataactaatgcaattaaaaaccaaagctctttaaccaccaaataacctatgcaattatctcatacacacacatagacacacacacaccataaaatacaaatgattaaaaaacacagctttcgtgtttgaaaactttccttacttctctaaccctgagatttatagcatcctttcacaaaattctaatttcatttgcaaacaaagacaaatgctcattttagcagtcctttgttaaacagtttgtgagtgataatttatgtcaaatgataatgagaccctctgggattttcagtaatttcataccaactgaattttttgtttgttgtttagtttgttcactgattatcttctttcgttttcttctcttttcacaagcagattcataatgattggcttaatagtcattctggccttcatctgtaactaatgaaccttgtagctattatgagtagcattctttcctgatatttgttaaactatcaacgaaaaaactttaagaattcttagtaagagcttagtaagaactcagtgtgatattttttaaaactttttttgttcgtgtatcactattcactttttcaaggtatttagatatcagatcattcataaatcttattaaatcaatcatatctgcccctcagatagcaacttttagtcttctcagccactgaaaattttctgtaacattaacatttaaaagaaagagtaaccagttgtttcagaagtcaaaaatattttgcccaactaatcttcagaattagacaatctttctcaggaactttgaagttggccaaagtatcatttccacccctaactcttatcttttcttcaaacttcattttaaaaatgaaacaaatgtttagagtatatcattctcatttgagtggagaaattcccatgtaaatatcagtctaatatcatgaaattattcgtaactttgttgaatgactttgaaagtcaatttattttctatcaagaatgaccatcctagagtcatgaataatactaaactatttcatcccattgttaaaagattgaccatcataatggtacttggagccctttaccaagtttagcttttagagcttttcccctaatgtttttatactattttaaacaattaaaagtataaattaataaataaatgcctgctctctactttcgttaataacattgtaaaagtaaaatgggttagtatggtggttccaggaccctgtggaactgactaggcctacctttcccctgcttctggtctctctttgagaattgttctggttttcattcagctttcatggaacagccatcattttatggaatttggatgcaattggtctggaccagcatcctaagaaattaggcaattttgatatttgcttataatggactgaattgtgtctccacaaaattcatatgttgaagccctaacctccaatgtatctgtttttgatgataggcttttagaagataattaagattaaatgaggtcatgaagatggggttataatctgatagaactggtgaccttataggagataaatctttctttctctactcatacccagggaaaggacatgtgagaacatgagaagatggccacagaaagagggtcctcaccggaaactcagttggctggcaccttaatcttagccttcctagcctccagaactataagaaaattaatttctgttgtttaagccacccagtctacagtatcttgttatgagagcccaagcagatgactaagaacaggcagatgctgaagaccataaaatatcaggaaaaaaaagggggcgggggaagataccatccagaagaaagataaatggtagaatgttgatttgtccttttctttgataatgtgtctccaatcatccctacttcttccctccaaattgtacccttttatttggtgtttattgaagtatgtttggagaatgctgaaaatgctgtgttaggaggaggagtggattttgaactacatcattattggtcccaaaatggacaccttttaggtaagcttaagaaactcttcttgtgctgctcctgagaggataaaaaagaataagaaaatatgcaagtggataactacaagatttgtttttatgataaacacagaacactagaggcgactccatgattatagggaacaaggattccgaaagccctaacatactaggactgtactgctgctgctactgttattgttcattttcaagtttcttttactaaacatttatttaaaagtcttagttcaattgtattgtggtaagagaatgcagactgtaggattgttacttgtgagtttttttgcatttccttcatcaatttctaaagattcagagatactagaaaagacaacaaagtctcaagagggtacaaagtttattagaaatttagtaaatatactttattcattaaatcatttagatcccctgtatccatgttttttcttttccttcctgagttatcaaaaactgagaggcaggttaagttgtgttaagctgaattaatggagtttgcatttactattctgtatctctaacagtgttccctccatataatccaataaatgctatttagtgtaatcagtcttgggctttagcgcagagtaaatgttactaaattgctattttctattacatctctttccaaatatccttccaatctacatttgagataataaaaaatataactatttagacatgtgacttctttatttccagacctaaaatggttagccatttaaccatgattttcccatgcttcaattatccatttttacttataccttaatcattttggatatgtttcagtaaattttacagtgtgaatacctgaagatctctttctctcttattcatttgtgaaaggctctgaatactcagcagacattgtttcattgtcttctgactttcagggttacaataggagaagaatatcaccagccttattttcgttcatgcattatttgcttgttttcttttttgtcagttgtatctagacatttgtaagatgtttatttatcttttaactaagttagtagttttcttaacatttatttaggcatagatgtcttctttcactggggtagatcaggcacttgccatctgcatacaggtatgttttcagctccacaaaatttccatatattaatttgattattatttgtgttccatttattttgtcctctttttcaggagtacagcttattttgggtttccattctctgttgtctgtatctattatcttctttcacaatattctgatttcttatttgattttcctgtgggaaagcttatcagtttgggattctatgtcactgtctttatttaatgtgatctctacagtgaagtttaattctgctattatgtttgtagtttacttgcagtccttacatattttatccatttccctttttatctcatcccgttgttttccaataaattttattttctcttatggcctccattcactgtttcatgagaggttactttctagcatcacattgtggataccaatttctacatacattttttcaggattctagaatatttatttcagggatgtgtgcttgtcctctaagtcttcagggtggcaatatctttcacttgttcaacagtattttttattaggtcttatgctaaatttccttgaaaaagatgagaccaattctgatttagagttcattcagagtagaatgtgctgaggcaggtggatcacctaaggtcaggagttcaagaccagtttggccaacatggtgaaaccttgtctctactaaaaataccaaaaaaattagccgagtgtggtggcacgtgcctgtaatcccagctactcaggaggctgaggcaggagaattgcttgaacccggcaggtggaggttgcagtgagctaagatcacgccattgcactccagcctgggcaacaagagcaaaactcttgtctcaaaaaaaaaaaaaaaaagagtagaatgtgcattccctttacaagcatggcctgatgtagttctgatctactaagcctcatgcgatattggattttctgatgctgtaaaccagcagagtaaattaaaatcttcaacttttagcagactctgcaatcatggtttttaaaaaatcttcagccccatattgttgcaggaagtcagggaccccaaacagagggactggctggagccgcggcagcggaacataaattgtgaagatttcatggacatttatcacttcctaaataatactcttataatttcttacacctgtcttactttaatctcttaatcctgttatcttcgtaagctgaggatgtacgtcacctcaggaccctgtgataattgtgttaactgtataaattgattgtaaaacatgtgcgtttgaacaatatgaaatcagtgcaccttgcaaaagaacaaaataacagtgattttagggaacaagggaagacaaccataaggtctgactgcctgtggggtcgagcaaaaagagccatatttttcttcttgcagagagcctataaacggacatgcaagtagggaagatattgctaaattcttttcctagaaaggaatattgatattaatactatggggaaagaattgcattcctgcagggaggtctataaacagcttctccgggagtgtctgtcttatgtggttgagataaggactgaaatacgccctggtctcctgcagtaccctcaggcttactaggattgggaaactccaccctggtaaatttggggtcagaccggttctctgctttcaaaccctgttttctgttgtttaagatgtttatcaagacaacacatgcaccgctgaacacagacccttatcagtaattctgcttttgccctttgccttatgatctttgcttttgccctttgccttgtgatcttttttggacccttatcaggagtttctgatttcgtccttgtcctgtttcctcagaagcatgtgatctttgttctcctttttgccctttgaagtatgtgatcttgtgacctactccctgttcttgtaccccttccccttttgaaatccttaataaaacttgctggctttatggctcaggtgggcatcacggtcctactgatatgtaatgtcacccccggcagcccagctgtaaaattcttctctttgtactgtttctctttatttctcagccagctgacacttatggaaaatagaacctacgttgaaatactgggggcacgttcccccaatactatattaatggtgtttattgtattgagtgttgacatggtttagctgtgtcctcacccaaatttcatcttgaattgtatctcccatgggacccagtgggagataactgaatcatgcgggtggttcccccatactgttcttgtggtagtgaataattctcatgagatctgatggttttataaggagaaacccctttcacttggctcccactctctcttgcctgccaccatgtaagatgggactttcatcttccaccatgattgtgaggcctccccagccacatagaactgtgagtctattaaacctctttttatttataaattaccagtctcaggtatgtctttatcagcagtgtgaaaacagactgatacaagtgttaagtgtacactcaatgtgtctccatgattgcattcacgtgcatcttatttttttttttttttgagatggagtctcactctatcacccaggctggagtgcagtggcgcgatcttggctcactacaagctccgcctcccgggttcatgccattctcctgcctcagcctcctgagtagctaggactacaggtgtcagccaccacgcccagctaattttttgtatttttagtagagatggggtttcaccgtgttagccgggatggtctcgatctcctgaccttgtgatccacccaccttggcctcccaaagtgctgggattacaggcatgagccaccgcgcctggtctcatgtgcatcttctaacaagcactcaatataactgctgcaaattctaatttttaaataactctaaatttagggaaaataaatcaaccacattgttttccttacacaaatagggcctcagtaaccactaaaagcctacattcaaaacatgtagagagagatgaatgtttggcatttaatctgtatcctgatgtttctgaatcaaaaaatgacacaaattcagtaatattcttaccatattgtttcaaaagtataacgttcatataagtaacagttgtagacctgtgcatccatttgaaaagcctgggaaaaatacaaatgacagcccacaagccacagggcattatatcaggaagttataactcaaggtaatatgcacagacaacatgtatcctatattcctaccttgacaaatgtgcccacttaatcacctggaggaaaaggtttgatttagaattctcagggcatttgagcagggaaatttgggtcctatattcaaagtggaagccagccttggggctgacatatccctctactcctgcatatgcctcaccctgtgagatgagaagaggatcagagtagggctaaaattatatttaccatttgaaagcccattatgtataaaatactgtcacagtatattctaatagttgtaaatgaaaaagcaattacgatgtttggaatcaggaaaaacatgttaattgtgctattattgatggtcagtccttggttacaggttttcataaaatagcttagttaatgtttcaaattaatcctgccaggtaaagtgatcatttttattttacaaatccaaagactggagcatgcaaaagccaagggacatgttccagaacaagaaggggtagattcaggattgaaatctcagtcagtctgtttacaaaatccactttttccccattcccttaattcatgatagaagaatttctgccttatcatattcttgctatcttatttcctcttcgttttaaaactcaacatttaaatttattcatcactatgccaaatagttacatatttctgcttcataaaaacacctataaaatactggttgaaatgtctttttcttaaacatttatctagttaattcctacttctttatatatattaacttatttaatcatcaccacaaacccatgaggtagatactactactatccccatttttacagatgaggacaaataaagcacagagaggttaaccaatttccccaaagaagcacagctactgatgaaggagctgatgtttatcctgctctatcaaccagtggactctaatgccttttggtgctgttttagctccatgctaattacatagggtcaggcaaccactgtatttacaaaattcatacacttcagccattgttaggtcttcattttgaaagattccatcaacggacacaataagatataattgtgtcctattccttttagtgtaccaccatctcagggttatgtctgctttgcctccaatcttttaattgctctcagcacatccaatctcaataaaatacaatgatgaatatcgaaatgctggatcctggactctctccaagttcagacttctttctgcgctcttcaaacctcgtcatgcactggcttccttcagttactaatacattcagctttacaatttggctcctccctatgactcatttgggattgatagtgtacctcattcttctttccctcattaagaactggcctctctatagctctctgtctctggtcattattctactgcatccacgagccaaaggccccatgtttcatacttactcagacccctaaagcaccataagcatctacgatattcctaggcttgaactatctgagaggagcattaaaaaattggggcatttcatctatttttgaaacaagactagggaaataggtttcgtacctataatttatctattatctgcagcacctccagttctctaacttgcatcaaactctagcatgagtgatcaggaataactttcacttttacatgtttttcttcaattagtgattctaacaaatggaaatcaccatatacttatggggcatatctcaagttgtcccccaaaagaacctggtctgtttagattaaatgaccacatgcatatctaagagatattttaacatcggctctactttgcaaaggctcagttttgcaagttataccagaaagaatgcatttgaaaacataaggccctgggcatctataagaaaaccacatcagtggggtcattaaaatttttacttaagtaaacattaggaatgtgacaaattgctaatttcctatgaaggattgtaaaattccaactgagagctcagagctgagcatagacgggagagtagatataggaacctttcctaacctcagagattcctcctgctgcctatatttgaatttaaaatattgatgtcacctcttggctaagaagttatcactggtttttataattgttgctctcactgaaagactccatttcaaaatctcttatgtagagattgtaaatccgaccacatatgctggtggtaggaatcaccaaggcacgttagttagaaagatctaactgaaaactacagcatcagaaagacttgtctctgttatcaaagaaacaaacagataatgtaaccataaaataatcagagctctggccaggcgcggtgcctcatccctgtaatcccagcactttaggaggcagaagtagatggatcacctgaggtcaggagtttgagaccagcctggccaacatggcaaaaccctgtctccactaaaaatacaaaaagttagctgggcatggtggtgcgtgcctgtaatcccagctactcgggaggctgaggcaggagaatcgctagaacctgggaagcagaggctgcagtgacccgagatcatgccgctgtattccagcctgggcaacagagcgagactctgtctcaaaataataataataataataataataataataataataataataatcagagctcgccaggaaagcaatgataatatctgggtgtggcatggtacagacctctacaatctaccctgaaccctatcaaggtaggtaggtaaataatcctgaatctataacctaccccttcctagactattattttgataatttagatctattccaaatttctgattagctgtttaatgaaacactgacctctgatgtcttcataatagctattagcactttccaggatgttttaatacaacaaagatatattttaactgtttcattatttgaagattgctactggtttcagtgctttggaacatctttaataaaataggagccttgcatttattagcatattaatattttggtttgtttaaatgtgccatatatattctgtattacataaggaaaacaatgactatagctctttaaagacagatatcagaacttggtggagaaatggctgattcgaggtctggacaggaaataagcaagtgatctggaacatgtcaaaccaaatactaaagaggctatcaaagttattaggatcatttcaaaagaacttgagtcaccttgaagaagctcctgatggccagagatggaacaaattgcacattaataagggtaaacattgtaatggagctgatctattgtttcataaggatacttaaagaaatactaacttatcactgttggataatattagtaacttaactcatcacttgcaatctggtaagtaaagagtgagaaagaagtattttatgccacttaaaaaatattaaaaatgggatacccaggtaattaaacagtaaatgagaagtttctccttatagaaagtgttccagctaataaagaaagaaaagttgatgaaactagaatatcatcactttgaaccacttaatgaactaatgatggattttggcacttgaccatcaatggctacgaacgtcacaaaagagggacacaatcaaacctccagtgcctcctcatgaaagaatacaaaatcacttatgattgtcgtgtgaaaaaaaaaggaccttgaattgtatcaggctgcaccacaggtatgcaaacagcaaaatccagactgtgggcaatgtgataaaacaaacaacacacaccagtgcataaaatttcagtagggagaaaaagagatgttgactgagggagaatcaacagattaaaatagacatgaaacatatattaaccaaccacacagtgtggaccttatttagatcctgattctaacaggaacatttatgaggtaatcggaaatttcagccctgaatgggctcaaatttgacagtttgattaaaattgtcaaatcaatttgacaattgatttaaaaaattcttattaaatttttaaagtgtaataatgatattgtggtaacatttttttttttctgagatggaatctcactctgtcgcccaggctggagtgcagtggtgcgagctcggctcactgcaacctccccctgccaggttcaagcaattctcctgcctcagcctcccaagtagctgggactacaggggcgtgccaccatgcccggctaatttttcatatttttagtagaggcagggtttcaccatgctggccaggctggtctcaaactcctgaccttgtgatccacccatctcggtctcccaaagtgctgggattacaggcgtgagccactgcgcctggttgtggttacattttttcaagaattattatgtttcagagatatatactaaaatgcttacagacaaaattatatatctgagatgtgcttcaaaataatatggggtgggggaagtgaatacagtaaaaatggagaaagattggccatctttctgtggccacctgggctggccaatggagttgattacctatcctatcttctttagtgaatattcaaagttctccaaaaaaaaaaaaaaaaaacaaacaaaaaaaaaactagaaacaaaacaaaaccaaagaatacaggtctttctttttttgtataacctgctcccaatgtttaatcaatttaagtatctcaagggaagaaatgtatcagaactaactaaaaaactggcatatatgtagcatgagctacattaaatatttgcaaaagcagcccatttttttaacctaaaaacagcagcccattttttttgccttctttattttacttttttaaatatttacttacttatttaaaagtcaccaatatatccatttgtactcattagcactactgatcattgaatggaaaatcagtctatacaataaagctgtattcatgtagttaagtttaattaagttcatcattattttaatagaacagaaatatagcaacacataggtatgagatgtctgtttactaaagatcaggtacaaaaacaaaaccagagttctttcatccttggagtggataaggtagcttttaatccagtatacaaaatacttttttcatttaaatactttgtgctatttccactgattgacatttaaacaatctttaattgtaccatatatgctaaaaatgataaggtcaatgtcccaacatcccagcctgctcttttcataccttgtttttccattatctattgatagatatcagttatcaatttgttggttatgtctatgtcaatggactttcaagagaaacataacaaattgctaaaatacaaatcctgtcaattaaaaggtagggtgatgacacatcaaaatactgactttaaaatgccaatacatatatatatccacggtcttagtttgattttcttatgatttaggaattttatcatttccccctcaagtttttcatgacccattttttttgtctttgaggctctgaaaatgatctttattgtcccacaccctgcgattcacctgttcaaacccagaagtgaagggcgggaatcaggacccgggctccggatggaatcagaccatgtttttaccacagagtccttaaattagggaggcctgcttgatatacaactaaggaaaattgtcctttaattaaggggcatttgtgttcctctgtgatttttttttgcagcaatatgaaaacatttatgaaatgtttatcctcacattctgaagtgcacttttttgagtccttggctcattttcaattactgaaataaccaaagaaagaacaaacaaatccaaacaagtacatggaaaatacattttcccccttctcttatttctctagtgtacagtctgttcttgtttatgatatttatatcaagatcccctttcttgcataaaattgataattaaaaggaaaacacttacccagaacaagaagttgaaggtaaacatagaatattttatacaggcactcacacctgccatttcggaaaaggattaggaatccagatgccgtgaatttaactattcgttacaggcttgtcctgcaatatgctctggagcaacttgcctgcagagatttctgtatccacggcttcagagcagaaagagaaagcaaagaagtagagggaggaataaaaagttattaaactggataaaaaaattaacccacacatttaaatatcgcaaaggctattaacccacacatttaaatatctcaaaggctattaactcacacatttaaatatcgcaaaggctatctccaggcaagtatgttcctttgcttgtcatagctcctggggcactgggccaggatatttatgatcctttctcaaaaactgcctcctctaaagtaaacagatatcaagtgaagggaatggcactggatcaggcaagagaatggcacagtgctactaagttcttggctttcagaaaccactgcctgacttccccgccctccatttcaactatggggaaataaggttgttttgttctgagttaaatggacattgtatctctactcatttttgcattgcattttctcaatactacaaaattccttctaaatgcaataaaatgcatttagaaatctgcaaaatatcaaagcttagacatagcaacctgttatcattaaacctagaatagtaaaataaccattacatgtatctgccctccaaaacatctaaatttatttcaaaagaattccagagctgccgtaaatacaccacagaaattgcagagggagaggcagccttgcctatcatgataagaccatttgctttttatctttatttctttatgatacaaagggaaagaaatcataaagtggcactgactgcaacattgttttcattttataatgcgtagtcattctgatagcttggtttgtttttaaggtggacactgtaatttccttcctctgataaattgtatctagcaacagctgttctccaccaactcagtttctggattccaggtcctcccggacaaaaaaattcaaaatgggaaggtggtcatggatcagtgaccatagattttactatttgtttctagtgctaatagaaggcagctgtctcaggtaaaggcaaaatgctccgacatcatcagggaggtgtggactgctttgtgtaaacagcctgggtcatgttagtttccacatcctgcctctcaaagggagttcttctccccctaaataaaagaaccctctactttaaaaggttgttgagaaaattattctttagaatctttgctaagttttacacgataagcaagcatgaactccttacaaaagaaaaatattatttctaattttcactggcatacaatgtttttgaaacaattctactccctgactacaaatacaatatattttaatgcattatcaacaataatatatagcgttaaaggccaaatttaggattaattccaaaaataatggcttaatatataaatcatcactaaaattgtttgtgttctctttcctactagaaaatggatagtttcacaaccttctattgagatattttgtatatagaataatccaaggctgaaagaataatttcagattgaatgaaaaccaaaattgattcatagtcccagaaatgattatttatcagaggctaaaattaaaaaaaaattacagatttaaatgctgctttgttgaaaagaatgtattgaatactaccaaattttagtttgaaatagatattttggtggatgctgaacatccttaaaaagaatactgtgtagtctttagttgaatcactcttgaactctgtaacacaaaaatcaatggatgtgtttgtacaggagaatgactgtgtaatagaacccctagtctaattcaaaacctatatgaaacagttcactcctggaaattcctattcctattaatgttataatcacacaacactctcccaggctgaatttgtacagatattttgtatttctctttctttccatccaatcactcttactggtctgtgtagctcctaaattactgtcaaaactatttcttccatctcatccttttgcatttcattattcagtcctttatcatttcttacttgagctgtgtcaatagaatgagaattaatttccctggcagtttctcccagttcctctctgccttagcactttaaaattctttttgagaaatacttattgattaggtaatgataatgatgaaaacccaatctaaggatattttccttttacctacaagataaagttcagattccttaaagtagcatttacagcacacagcaaacaagtcctccacccactttccagaattttgtccctcccctttcttcctaggcagcctccacttctaggctccataaccacagaattatttcccaggcctagaacacacctttggattttatgccttgttccttctgcctggaatatcctttcccaccttctctattgcaacatccctgtggagccttcccttcctcatcctctgcccccactctgggcagatttacttgcttctcagtcctcaagtccattattatttgaacagaccttaaatctacaattgccactatatcacatttatttgtgtctctcccccacatttgattctatatgcctgaaaagcagaaatcttaccctattcacctctgtacctacagtagctggcattagagctacagagatttgcaatggcagccaagctcctcagaaagttcaactagtgatttcctcattaggttctctagggaactaccaatatgctacctctgcctttaaaaaatctattaggtcaagaaaaacagtttattaatttcaggacttgtcagagccttcaactttctaatattcaaggaggtgatatatagcaattctgaaatgaatataatctcagaacatatttttgaatgacatattcaggactggtgttacagaacacacatacgcacttacagaagcactgttctagacaaactctcactcttacacctgagaaaagagcagcataggcagattgagtagcccaagttcacaaaactggttagatctccttctagaaacaaggtcacaggattatcagatcagtattctgtctactggcgtcaacaatctcttgagttctgtagtatgagaatgagtcatttactcattactcatttaacgtgtcttagatattgagaaattttcatataacagatattttaacagtggtgggaggttgcaggggttggagattgtcagtaataaatcttagaccctgtgaaagaccgggccagtaaggaaagaaatggagagtgaaatattataagaagaaatgacaatcgagggaaagaacagagggaaagtctaagtaaatttagataaagtttttctaatgttgccatcatgccaattactattcattgcagcaaatgcacagagtaaggcaggataatgattccaatttgattaattgtgaaaagtctccatgaggcagtcatcagtgaactagattttgatagcagtatgggaacccatgcaggggaaagaaagagagagagagattccttatgctcagggcagaggaaagtgcatgagtagtaccatcaaataccccacagaaaatatggcattttctctaagtcatcaggcaaaccaggcctacgtttgggacttggaccagaaattaagcatagatagttcatattttcatcatgatatcatcttctcctccataagataatattcaaaaatttattcaactgatgtattgaatccttaccatattccaggaatgagactaagtgctggaaacatagtaatttatgaaacaagataaaaatccctgccttcctaggccttacaccatggtgaaaaggtaacttctttgcctttttgtttccaacatctcgttacccgatatatttgtccatggaatagacagtaaaaaagcaattcatgtgtggtagagaaaagattatttttttctcttgtcttttatactctcccattatcactgtccctctatactatttgtttttcatgacgttgttaataatcaattcatgttctcaaaggctaacagcagcaataaaaacataatgttgagatttctcttccttatgactgtactgaggggtgtgtatgtaaggacatgagatcatacactctgaacaatttgagtgaagagattctggtgcttttagcatgtctcattttgaaaaaccttttttatttttggaaagttggagttctcacttaggggttttatggtctcttttacaggagcagagccttggctcttgtgttctagtcccattctagccttcctgagaccaatattcttcttctgctttcatgtgatcccaatgctctgtttcctaccctctgtgcttatggagcctggctcataaaaacctttcatgtattcccactggaaatgcaccagataggaagcatccggtatgggaaagatgcctctcctctctttgcaggacattttaaagcaactgtctctacttgagagtattaattccagctcagaactaaagtaggggttagaattgtcattgtgaagtagcaatacagtgtttacagaaaatggatacccagtattcaacattcttcctcttctatagatactttattctaaaatattaatgacttgcacctggacataaatttaccatataggacacataaggaaaaatatggaaatgtgtatgaaagaaacagactttagctcaccaaaatatgtgtgtataaggaaaattgaggcaaaatggtgcagtgattaaaaatgcagtttataaccatggcagattagagatgctgtggattcttattaagcctcactatggcatttatactccttttacagcaggttaagagaccagctgctgggtgggaaccagggtcaggtccttggcttggcagccctgaagctccactttgccagcttttccaggggtgatctgcttcttgggaaagattcaccttaaaagctctcacaggagccagaatgtcaatttcctactttatcatgagaaatgcacccatcagactatccatccagcataagacagtagctgatcagaaaactctctccctgaaaaaaaaaaaaaaacagcacagaagccagagccatacacagatggtgtcttggggcatacatttggcaaaggggtcagtgttgccaagatatgatacgctgacaagtctagaaccaccccagggatccaacagtcaaaccttccagaggagttcagtggtcttagcatcctctccctacaattgctgtgatacaccaccaaattcgttcttcttgaggttgccttctctgtactccattcagtccctgccccctctgtggccacatctatctccagataagagtccatgataactgactaggtttccatttgccagactgtaaatacaattcagtcctgcttccaaggtcacattttaattgcattttagatacttctaaaattcttcactcacacaaaattgatcacttggttcatgcctatagattttactagttgatttgtcagaagtcgatcttatttttcttctctctaaaccaggactcgtgccaatgcacaggctgcaatactcaacaagaaaacggagaatacaaagcagggctttgtaatcaaccacgtcaggatcattgaacagcctatttttgtgctttattatttgcctggttgtttgctttttgggtttaaagtttaaatgctggcctgcttttctctgagttctctctgaatcagttctttgtttgccaagttcacaaggtacacattaactattaaacatgattaggttctaatctggcttaacactacctaacagtggttaagaggtaggaaggtgagtggaacccaccaatacagaagaaaaaaaaatagactagggtggcgatattaaacacttgtatgagacaccagcttctcaaactgcaggagccaacaaaatattacactgaatttaacacagccttgtcccatgactggtcagaaatagacactttactcaaaatgctaattaggatctcacaagtgactaattccgaattacaaacatttattcagtctcacacagtgggtatgtattgcatggctatcctagttcccaaggaaaaataaaataacaggaaatcattgttaagaggtcatttatgaggaaatcccaaacctccatttcacacctttgtaagaagcaacaaaatatcccaaataagctcaggtagaaaataactcaatctctggtttgaaggaatttctctgtagccacaaagagggatattttaggtttttcttgagtacttggaagacctgatttgcccttaatgtgagaagaaaatggaagatatggatatcccaggaaacctgtggctgaatgcctgaaccatggttccctaaaagagagagcaatggcctgactccattttcctccactgttgtcccagatgaatggaccatcccaattttaatcatatcaaataaaagtgcatgtctttaaacatacaatatccaaatgcagtctttccggaattcaaggatggaatacaccattcctctgagaattctcttttggttcgtttctccatttatgatcaggcattaaagagtccctcctagtaattatttacttattaatatcctggttgattcagaaattgcctcacccacaaagcccaaacatgtgagaaagtcagattttttttttatttttttaattaggctagccttgagggttattcaagtgcctttaggtcaaacaaagcccagagattgttttgctttacacggagtcacattgatcttttatgtacacgaatcattcaaccctcagaaactattccaaaggagtccttactggtttggagcgtttttcttaattatggaaaaggcccaaactctttctgcatgctaatttatttatatcatatttctacttgaggcttcagagagccagggaattcctgtaagtgctccgctgtctttcctcctcactcttcatgctttcttgaatacatgagcgtgaataagtagtgttaagccagaaagactgccctagccaagacccctcaagaaggaatgtgcaaatctgggaacacgttccagaatttcttgctaccagcacagagcctgatgtataagaagtatcagccagaaatttcaagtttctcaagaatcactgtattctcaaccaatctcctaaggagctctctgagaaggaaatagttcataaagcaattctctgtgcagtaaaagattacgtcactccctacctttgaaccctctaatggattcccatcacaattagaataaaatccaaagccacacaagatgagcccttggctgactcatcaacctcattttcccctgttctctcccttactcatgctgctgcagccacagtggacaccttgctgctccttggacttgccaagcgtattcctaacttaggggcttcccatttcctctgtcttccccaccaaatcctcttgtgtctagaattggtgggttcttggtctcactgacttcaagaatgaagccgccgaccctcgcggtgagtgttacagttcttaaaggcggcatgtccagagtttgttccttctgatgttcggatgtgttctgagtttcttccctctggtgggttcgtggtcttgctggctcaggtgtgaagctgcagaccttcgccatgagttttacagctcttaaggcggcgcctctggagttgttcattcctcctggtgggttcgtggtctcgatggcttcaggagtgaagctgaagaccttcatggtgagtcttacagctcataaaggcagtgtggacccaaagagtgaacagtatcaagatttatcgcaaacagctaaataacaaagcttcctggggcggcctgcttttgttcccttatctggctccacccacatcctgctgatgggtccactttacagagagctgattggtccgctttgacagggtgctgattggtgcatttacaaaccttgagctacacacaaaagttctccaagtccccactagattcgctagacacagagcactgattggtgcatttacaaaccctgagctagacacagagtgctgattggtgcattcacaatcccttaactagacataaaggttctccaagtccccaccagatcagctagacacagagcgcagattggtgcatttataaaccttgaactagacacagggtgctgattgatgtatttacaatcccttagctaaacataaaggttctccaagtcccccagatcagctagacacagagcgctgattggtgtatccataaaccctgagctagacacagggtgctgattggtgtgtttacaaaccttgagctagatacagagtgctgatcggtgtatttacactcccttagctagccataaaggttctccaagtccccactagactcaggagcccagctggcttcacccagtggatcccacaccggagccgcaggtggagctgcctgccagtcccgtgccgtgcgcctgcactcctcagcccttgggcggtagatgggaccaggcgccttggagaagggggcggcactcgtcggggagtctctggcagccagcgcaggagcccacggcggggggacgcggggaggctcaggcatggcgggctgcaggtcccgagccctgccccacggaaggcatctaaggcccggtgagaaattgagcgcagcgccggtttgcccgcactgctgggggacccggcgcaccctctgcagctgctggcccgggtgcaaagcccctcactgccaggggccggcggggccggcccggccactccgagtgtggggcccaccaagcccacacccatccggaactcttgctggcccgcaagcactgcgcagccccggttctcgcccgcgcctctcccgccacacctccccgcaggctgagggagccggctttggcctcggccatcccaggaaggggctcccacagtgcagcggcgggctgaagggctcctcaagcgcggccagaatgggcgcccgaagctgaggaggcgtccagagcaagcgagggctgcgagggctgccagcatgctgtcacctctcactcttagtttgaagagctaaacagttcatcctcttcattgtatttcatatctctttatgtgttgtttccttttcttctttctttctggaatgtctacttcagaaggtcaagggcactttttgtgttgttcactgccatatccccaaggcttggaatatagtaagctcttaataaatatttcttgaatgaataactgaataacaagttatctaaatatactaattcatttttaaataacaagagagcccctgtttgtgttcaccattgcattcctgctgcctagaagaatgactggcaaattataatcatcactatgtgctgggagataacgttgcaaaagaaaaacaaagttcacacggctcctacaagcattatattcaaccaacttgagatggcaaacaaataaatacataagtaaatatgcaaaaaaaaaaaaaacagaaagagaagaatggcagtatcctgtgctagaaagtgaggaaactacttcacattaggtgtaactctgataaggtaacatttaagctaagtcctgtctgataagaaggcataagccgtgctgagatctatgatgagagcattccagacagacaaaggcaatagcacaaagcctctaaggtgagcagatactgagtatgctggagaaagaaggagagcatgtacgtagcatagttatggagagcatggtatgagatgagtttcagagaggaagttcttcaggccagatcctgtagagaggtgtaagccaaggaaaagataataaagttgatttaagtggtattggaggtgcaggcagattttaagcaatgaagtgacacaacccagtgttctaggcagaagatgattgtgagtggtctagggtgaatgtagtgtagaggaagagaagtgaatggattcaggatatgctttagaggtgaaatcaacagagagtgagggaaagagaggaacatggataccacccaaattttaacttcaacaacttggttgatagaaaactgggggaggagcataggttctgttttgaatattttggattcaagatacctattagatatgcaagtgaagatatcacatggacagttcaatatatgaatatagaatacagggaaaatttcagggccggagatacagatttgggtgtcctcactgataaaagaaaaacttcagccaaattaaacttaaaggagtttaattgagcaatgaaaaattcacgaatcgggcagccc

SEQ ID NO: 361 - DNA, 48589 bp, Homo sapiens
aagtatatgaccattattgaaactggtctcaagaccaatctctgccatttccctcccttttaccagctttttcttatttccattaggaaaatgaatctataagagaaatttaggaagagggaatttaatatataaaagtaaatttttcaatagccacaaaattgcataacaccattaacctcaaatatttatttttgaaggttgatattttaatctcttccattttcctcaactatcttctcattaggcagcaatctggttaatatgaaaataacacatttcatatgtatattacagtttataaattactttcatattaacttatttgatcttcacaaaaaatgctttaaggtaatctaaacagaaagtattattttgattttatggatgagaaaataactatccaaaaagattacataacacacagctcataagtgcttaagccaggactggaataaagactgaaattttagatttctagctctacatcagtttgtttgtacttcaacaagctacatcttgaaaataagtacacaagagaggactggaaaatctgtctacaaataatagttaaaaaaaggccaacttaatattcttcactacagtcagacaataaaccttgaattttaacaatttataatagatgtaaaacaataattacaaagaaatattgtaggtaagtattaacagtgcctttcatctatagaacatacagtaatttatatttctctcaatattctgagcaaagcaggtgacagttttattaaaagttcaaatctattgttagacatatgtatgtaatgtatagaaataccagtttagagtttagaagaaacaggcaccatggtatactgctagcagagtattcactggcaaaactattttgggagtagtctggcaatgtatattgaaagcctaaaaatgcacatgacctctcgcacctagttatttcctttttaatttattgtaaggaaataattatggatgtctataaaaatgtgttcgcaaaaatatgttagtattgtgttaacagaacaaattaataaatggattggttaaatcagagtaaatgaaagaataaaacgtagagctgtccctcagtatttgcaggggattggttccaggactcctacagataccagaatccttagacgctcaagtcccttacatacaatgatatagcatttgcatataacctatgcatatcctccagtatattttaattcatctctaaattacttacaacacgtaatacaatgcaaatgctatgtaaatacttgttatagtgctttgtttttatttgtattttttatcattgtattgttatttttttttttcaaatattttcaatcctcaattggttgaatctggatgcagaacccatggctacccagggctggctgtagttcttaaaactgatctggaaaaatgcaaaagatatattaagtgggataaaacagatttctaaacaatgaatataatagaatcatattttaaaggatatgtatctctgtgtgtgtgtgtatatatgtatgagtatatatgtgaccaggatattacacaaaaatattaatagcgattgtatacaggcagtgttattatagataaatgtaattttattacttttacttttatattttctcatttctaaaaatgactaagtaattttcctatatttctacaacagaataagttaaatatctttataaacatatataaaacatatatagcatatatatgtatcatgtaaatattgaaactatggaaaacaaaggataaaagttgaatttacatctatcagagagctctagagccattatgtgtgcatatgaagatacattttaaagagtatagaaatatgaagaaggcacagcacataagatgagtcaggagagagaacaacagcaacttattaaggcaaagtgtccagtatcagaaaataaatgtgaattaagcagtacattttaatagctacagtttctcacatctaattaacagaaagttttaaatattgacaactttggaagtgaagaagtttaggcagtttttgaaaaaaatgtgaatacaaagttcattgggaatgctggagatacttctggaaagtaagatacttcaatcatatgctatagcagcatcaagaaaggtactaggtgaagatcacagcagcaaacataactcccatgttgaaactataatgcatacccatctggaatatgtagctctgctcgccacaccttagagtagatattatagaaacaaaaaataagtccagaaatgggaaaataaattatgaaatggcaactataagggatgaaattaggagtctctgaagttcaaagacaaaagaagctcagaaaaatatttcccaaagcttataagatcataaattttacagataagataaaaataagcaccaagagaccaaattaatatggcaaaagtttaaggcaaatccaaggaaaataaaatattttgatggaataggtaaaatatataagatgtataatactactgcatttagaataaaatccaaaatccctcccaagttccataagtctcagtattcctggctccttcctgcctctcagatctcttctcctccagctgtcctctcattccctaggccccagccacactatctccctcctgttcctctaatgcacctctgtgctcactattgactctgcctggaatgctcttctcctaggtttcacctggcaagctgctttctatcattgacatctcagcttaaaagtcacatcctcatgaggaccgtccctgattgtcctactcaaggctacttgctcttggaaccaaccaatattgcattacttagtttaattttcctcatagtacttatcatcatatgaggtcatcattcgtttatttattcatgtaaactgtttttctctcaaactaaggaaaaaaacaattaaagagttttatcatcaaagagactttccctcaccaccccaggctagttcagatcactctattttattactaacttccacctcaccttgtcatttttcttttgtaatccaacttatacttgtaatttattttccaatatctgtttttctccataaattccatgagttaggggccactgtgtgctatcttattaatcaatgtatacccaccagttaccagtatatggaaagtactcaataaatactttctcgaatagaagaataactggtgaatgagaaagaattgggaataaaaaggcagaaaaaggaaagcaaaaataaataaaaagctacatgaaaaaaattatggcattatattaaccacttactattccgttctccaaataccactgtttcctactaaacaagaatataacaggctctaaactgcatttgtaatacaatatataggaaaataaacttttaagagtttcatatctgcaatttatgccctgtgctttctgattcactttttgtaaataaaatcctgtggatctttggaactgcaattcttccaaatcagcaattcaagtaacaaaaggaattctggatgactaaaaagcagatgctgtctgggtgccaagcttcatgcctataatcccagcagtttggaaggccgaggcaggcggatgacctgagatcaggagtttgagactagcctggccaaaatggcgaaaccccgtctctactaaaaatacaaaagttagccaggcgtggtggcatgcgccagtagtcccagctactcgggaggctggggcacaagaattgcttgaacccaggaggcagaggttgcagtgagtggaaatcgcgccactgcactccacagccgggtcgacagaacaaaactctgtctaaaaaaaaaaaaaggcaggtgctaaaaacaaaaccagaaaagctattaggagaaacgtcataaagttggaaactgaaaagcatttcatttcatggaataaaattttgttcttcagtaattatgaaactgtctttgaaaactctgttaaaaacaactttgactcatgcctgtaatcccagcacttggggaagccgaggcaagtggatcacttgaggtcaggagctcgagaccagcctggccaacatggtgaaaccctgtctccactaaaaacacaaaaattagccaggcatggtggcacatgcctgtaatccaagttactcacaaggtggaggcaggagaatcgcttgaacccaggaggcagaggttgcagtgacccgagatcacaccactgcactccagccagggtgatagagtgagactgtgtctcaaaaataaataaatacataaacaaacaaacaactttgagacattttacttcaaaggtttagattagttcttatggaacatagctaataatctttaaagtcctttattacactaacagttcatctggagtaatgatattctaataaatgctatattttagaagatacataatattaatatctttgtcaaatatatcttagaattaccttctctgtcctctttataatatgtaaaagaaattgatgagtccagcatacgcttcatcttaaatgaggtgtatgagaaacatgctaaactatggttccctatctctgcttcacaatataaaggtgattccagaatttggaagcctcaactataacaaactagatgaagacagaagctgattagataaactgcagtggtcaggaagcctcaccaacagagcaaacaacctccatcttcagctgcttattgagaggccataatcctttgctgcaatacatacaacagtggctagactgaacacagagaagggacatctgtttcttaggcctgttctttctcataaatgattgatggcaaatatggaggagagtgatctggatgcacaaagaaacttgaaaattttactctagccaattttaggctttcgttaattcaaagctgtatctgccatacaacaagaacattttcactagatcaaaagaggaataagaatatctgcaggccttgagatttcaactattttgccttttaaactatatattagctgaacgtggtggctaacataaacataatcccaacactttgagaggccaaggtgggaggatcacttgagcccaggggtccaagaccaggctgggcagcatagtgagaccctgtctctgaaaaaaaaaaaaaattagctgggcatcatggcacacacctattatcctagctgctcggaaggctgaggctggaggatcacttgaacttgggaggttgaggctgcagtgagccatgatctcaccactacattcctgctgggtgacagggcaatatcctgtctcaaaaaaaataaataaataaaaataaaataataagataaaacaaataaagtatatattattcaaagtaccctgtgtcttgaactttgtggatcaggactcacagtaagaaatatattttacatcagaatccagtacacatccaatacatatacaattaaacaaaagttcatgaacgttacccttacaacatgtagtgaatatgttaagttgctattttatgtcatctttttaatgctggctacataccacaaatttgagtaatgagtcatcaggtacagtttgagaaacactgctgtacgtatacgtgtggtctggcctctgcctacctccctaaccacatttcatggtattttgcaccatattttccctactgcagccacccctgcaccatcccaccacccagtttctattattttattacattgaaccataagttcctaaaatataccaatctcttttctgcctcagggtatttgatcttgttgttagcgtggcctggactcctccagatcactgcactttgtattatattatgcaggtctcaatataaaagttctttccacagagaggccttcattgaccacctaatttgaaagagccccagcctgcaatcccggcaggaggagtgggaacaggagttcattcattgcccttagcattcctgggaagtttgataacataatgtaagacaggcaaaaaccaaaaacagtattgagcaaatgtcactttctacctccctatgccattgcacaggtcatagaattctaactattgaaattctattccattttcttcatgacaacttttctgactctgactgagaagcagggactcaattgtacaatttgccccctattactttgtattctctcagaccacttagcgcattctttcttattttgtattcattccgcaaacatttgagtgcctaatatgatctaggcaatactgtgaacaacataagcatgaattcctccaacagttcacattttagtaagagtgacagatctataaacaaataatttcaaccgaatgaggcaagtacaataggagagatgtatactacataaaatggtgacaaaaagaatgaacaatcaacctctttttctttttttcttgatttcacagtgtggaggggaaagctctgaatatctgcatagattttaaatttgtatttatttatacttttttagagacaaggtctcgctatgttgctcaggctggccttgaactcttggcctcaagcaatcctctgacctcagcctcttcaatagctgggactacacacatatgccaccgcacctgactcgactcaaccctctttgagtagggaaggaaggcatcacagaaaagacacctacactgggtctggaagtgaatccacctttgcaaaaattataacagtgagagaaatctaacctaactgactccatattgcttctaacctcacaaagctaactgcccttgctcatacctgggcataggcaagctaactatgggagaaatttatagtttaactttgaagcaaggatggtaatagtcccttccaaaactgaccccctctagggactaaaacagccttgtaagactaatagaaggccgcaaggttaggactatgggagggacctaaaatctgctaaaatataggcataggtaagcaataaccagctactgttccttgcttttctataatttcttactattcagaagtcatgtagccagaggtcacaagatttgtaacttcaccaattgctcctttagataacatcactattgtaaaacctaagattggtcttgagatattttccaggcttctgcattctggcaaacctcctgatgccacccagatacatgcctcataccaagaaactgactctactagtcctatgactctcacctagacaactgactcagcacaggaagacagtttggaaacacctataaattcatccccaaccaatcagcagcgcccattccctaccaacctgcccacaaaattatccttgaaaaccacaacttccaagctgtcagggaggcggattttagaaatatttcccatccttccactcaactgccttgcctccattaaactctttctctgctgcaactcctgcattctcaatgtttggcctttctgggaagtgggcaagaagaacacgttggcctgtaataggagaataaataagtttggcaagcaacaagagggtgcaagtattctgtgtagaaggaattgcaagtgcaaagtagaaagaggaggcatactaccagtttgaagttgcttggtatgttcaatgaaaagcaagtagctaaaaggcaagagaattttttttttttaagtatggaaagggaaaggcaaaagctagacagaaaagtgcttgttcatggaggaacttgtgtgccattctagacattttactgtaggaaatagggaatctagagttttaaggaggtgagtaaatcaacaggttgggtttttaaaaattccttcttgtggcagagaaaataatggattggagaatttccagaccagactgtaaaagtcactattaaaataatcacgaaatgaggagatgacaaactaaaatttgatctagtgaacaactgaatatgggagaaatagaagagggaggaatgtaggataactctgatttctagtttaggttataatatagtagtagcattatttaacttggtgaaaataggagaaaccaggaggaaagatagcaagttcagttttggtcatattaagtttgaaggacatttgagacagatgtgtccgggaagcaactgagttaggcattagtagatctgagaggaaaattgaaatttagaagcaaaatcaaaggtgttagtagaatccatgtgagtggacaaaatcacccaaggaaaatgtctagactaagaaatgaaagtaatcaaggagttaattccaaagaatgacattcaaaaaccaggcacagccagtaaaaggaattaatgactatgaacctcagttgtcacaaagagactaagtaatgtaaattttgagaagtaattactgtatttggtatttaaaaggccattagaaacttaagcaagaacaactttcttgaagccattaaagaagccagacagaagacttttgtctgtttgatataagtaaaaataatatcctttcaagaagtttactgatagataggaggactaggaaataactggataaacacaggatggaggacatggttttgctttatttaattttcataagatgtgtgacttgagcactgaagagaagaaactggagaggaaaaggctgaacgcacaggaaagaaaaaaacaactggaagcgaaatgtaacagatggaagcaaatgagatcaagagcaaagatggatggattatcctttaatatccctttctctacactagaaatacaagactaaaggctcggcaaaaatatagagcaatgtgtaggttgggggcatgaggttgaagaaatggcctgttatactccatcatgtttagaaaggagaaatgaagagggcaaaagacagggtttgtaaagggaaggtttgaaaatgtcttcacagagaatgggtcaggggaaaactggggtaaccaaaaggattgctgagtagtatgaagaaacaaggggtggtgggtgagggctctgtttctaaattcatagctataactatctaaagatctttctatcctccagtccgttatccataagtgcttaaaagatatggtagttaagtgaattaactagaaccctctcaaacataggggtgaattaaaataacctataggcttatttaaaatgcaaataccgagctccattcctttcattcagaatttccaggggtgaagcccaaacagtgaattccagaagctctccaagcaatcccaggagaaatttctgtttaaaaaaaaaagaagaagaaagaaaagaaaagagaaaagaaaagcaagcacagacctagaaggtaaccaactggatagaagagcgctgatccaacatacacctgttaatggccctcgtgggggcgtggggcagtgctctgccactcagaaaagcaaaaagactccaagatctagggagattcagatcagtgttgagacagtcacatacacaccaccccatactcttaataaagcgcgttaatgtgaatctgtgaacatgaaaaatgccatgatgaacaatgcaaacacataatgtttgttcaaaacaggttattagactcgatgccttaccctaaattttctgtttcattactctagagacttagtaacattagtggaattcagggtgctgtaagaaatacggagagcgaggagactgcaggaacagcccgtgggaagggggaaagagataacggggagaaggtcgggaggaccggacaactttaagtgcccatccgcccgaagacttggaaagctaagtaagtaggaccccagagccgttcttctggcatcccctggcactcaccattgtctcaggatctcagcactagaaaataggtatcgttgagacaggaagacaccaccaccaccaccatcatacggttactcaggcaacaaagccccgcccactgtcgcacgaggcgtgggacgccaccgccccacctcttcgtccttagtggctgggagtaatctcagctgcgttcatccaatcgacagacccgcccctccacgctgtcgcctggggctacgagacgccattattctgtttccggcagttttacttccgtttgtttaacagctggcccggaagtttaagtgaatatgcggcttgggctccaaaagttgctgtacggtattttattttaaagtagaaatctgtccgcttttcacttacggaggccttacagtgtgtgttctgtgttacttgagtttatacgcactgcagaatttgtttaccctgctcttttggaaacgtattccggaagcgaaaccctgagtaatcggaagtggttaggagtgagagagctgctggatatgcggagggactgggcgggtcggcttccgaatggaagaggtctgtgagaagttaacctggtgataccgatccgaagagcctatcaagtgaagccccctgaaatacggagaataagaatcttagaggtaaatccgaggacaagcaggtataactaaggatgttggaaagggacggaggtctggctggagctcggtggccagtagctttggatttagggaaagattgttccgggaagactttttcagacagggatgaaacttaggtttcgacttccccggacagcaaagttgacaggcttgtcgcttcccggcctatcgctttcatacctgctcactccccctacttacttcttcaccccctccgcttcatttggcatttgccagcaggcactcgctgtgcctgtacgtttcgcagagcagctatcaagggcagtttcagggatcgttactcttacgaagggttttttggatacctcttttcggagcagtagagtgtaagtgtagaaaagtttgtgactgttaagaaagttagtcgtcgggttcactaattgaactgagttgtatctagtactgagaacgatctttttttgtagtgaaaccagttgtcatctagtgtacagtttgtcatatttatatcattgcagtagcatcaccttcttatatgttctctggtaaatctgagtctgtactgtaagacaatgtatacatttctgaaagcatgggctcgatatgtttctctttttacttttggagctacactattttaattttaactttttattaccaaaaaagtataaattatgttatcttgagtaatattttttgtcgtttgttaaacatctaaacagaagctcctttttgatatgtgtgtgtgtgtatacaaattgtgtcggtatgtctcctaagaaagtaattactttaaaattcctcttgtcatatggatgacaaaaccaccacagtaacttcattccctttgcttggctaaaattcaggacatacttctgacaatttagagtgtattggtgaggatggtgaaacggagtatttagaagtaaaccacccctaatttttttttttgagacttttagtagacataacaatgccttctgtgagaatgggatataagggacatttctctttctaaatgcatgcgtactaaatacagaagcaattaaaatatcataacttttaaattggaggtactctatgtgtttatatgatatttttaaaattatttcatatgcatacatttctaggttgttcagcagaagtcttggagtgcattttcagtggttaaggtgaaaaaatgactactaaaaatttagaaaccaaaggtaagtggcttttttataattgtttttaaaacatgacatttatgacgatgtgaaggaacgtttgagccagataactagatctcatggacccccttgggaatcatttgttatttcagatccctttatgtttattttttagtgcagtgtttatatttcagtactttagatgtacaagtgaaatttaacatcattagttagaatttattaggtgactactcttaaacatttaatgttaatgcaaagtttttaacagctatattccctatacactagaagattacgatttaaataagaatacacattttaaagatttaagtagatagacaaagcaactagggtgtatcaaagatctctttcatgttgtattagtttgctggggttgctgtaacaaagtaccacaaactgcatggcttgaacaacaaaatgtattctctcagttctggaggctagaagtccaagatgaaaatgtcaacaaggctgtgctccttcggaaggcattagagacactctcctagcttccagtggcttgctggcagtctttggtgctccttgtcttgtagacgtaccacccttatctccgccttcatattcacatggcattctccctatgtgcatgtttctgtgtctaaatttaccctttttataaagacagcagtcatattgaaaaaaggaacccagtctactcctgtatgatttcatcttaactaattacatctgcagtgatcctgtttccaaatgaagtctcattctgaggtagtggggggttagtacttcaacaaataaagatttgggggacacaattcaacccctaaattgctaaatacagtagtcactttttagtcctagctgatttgtcctctctaatatttaatactgttgaccattccctgccttttgagatacgttcttttgatgacttccatgacatcacttttattttcagtctactctgtagcctttcactgtccaatgcggtaattacatgtggctatttgaatttaaattaatattttttaaaaattaaaaattcagtttctcaatgacgcttgccaaacttcaagtggtcggtaggcaaatatggcgagtagctatttcaatcattgaagaaaattctgttggacagccctgctgtagctgtatcttctctctttctttttcagcctcttctccttcttatttatcttttaaatatcaacactttccaccactgtttcttttctactctcatgacttcagtaattatctatataaatgacttccaaatctatctatatccctaatctccttctttatgattcatacccttatagactactgcctactggccatcttcacatagctgtaggcaacaattttaacatgtcccatagtgaacttctcctgacccagcttattctttggatgggttgagttctgcatgctagaaccatcagttaaagatggaaaactgttttctagatgccaatttttcagcaaactgacctccagccacaaaccctctctaaaagcaggttgaaataagtttaagaaacaaggaagaaagatcatgctaataaatatttaattgaatttaattcagctttgcaacagcatttcataagtcaccagaaggcttttataccattagataagcaagtcagagactgtaatgaaagtaataaactggggattaatgggaaataagagcagttaaataattaatgtgaaagcaaccaacatggtgcttgtcaaaaagcaaaaactaaatacaatattatgattagtcattagaagtactggcaagttctctgtgaaattaaattactttttaatatttattattacttgtttttaatgaggattagagttataaggcactttaacaaacattattttgtgtgatcttaattatccagtaaggaaaataattctattagccatatttctatttaatctgtcatctgatgttagtgaacaaaagttacttgtattgcatggcctgtgaaaaggtgtacttggttgacatttgtcagttgtctgtgcttcctgtaactgcctcaggagataagtacggttgtttggtatagcaacagaacttcctctcagaagacatttgagcagcactgtcatcataagagggttgtatcatggctgctagtgctgtttctgaaagggaaacatacagtaaatagtaacaattagaaacttaaaatccaaagcttttcttggatgtgggattaaaattgaaaataaagctattaaagtcaactagtttagtaatagtagaccaaatagaaaggtctgagacatttaaatatttttgattccataaaatagtctaacactagttctgtagaataataggtgttaggtaaaaaagatattccatgagcagataaatttgataaatgctgtattaaaagagaggctatactatgggacctctcagagtcctatagtataactttaatactaatgtacattgaaactctgtagagatgcagtatgcaacattgcccacacttatttgaccagggatctctatccatagagcctgtggtaagaagaatgcttagattccacttcagtaaatctcgatgttactcttaagtccattgtatgtaacttattttactaatttaataataactaaactttattaggtgatatgggtgacatttaaaaagactcttgatttaaaattaccacatgacaatccctaatttgtttaactgtatcatagctgaatttgtatatgttctggaaagtctttcagactataaccaagttaggaattaatgatttagggtagaggaaaaaaaataaagcagtttttaaatgggttagtttttggatgttaaaaatgaaacactctaggtagtgtattaacagactaatgagcttcagtaagcatttattcattttctctgtgacaaggaccattttattagttcatgacacaaagattaggaggcggtccataccctgaagagctcccaacagtctagtctacaagagaaacaaattatttttaaaatatatactaccatgtttgcattactctgaaagcaccaagggatgggaggaggatgaggttaagtgctttgtccaaggtcacacaatacatggcagtagggacttaagttattttaactcaggctctagtgagttagatttcttttcactaccccattctgctgacttagagtacctctcatcatagattgaagttttatgaataaaagagaaatatttgttcaatgacagacaataaatttttttttgcctcaatattctagagcaagggttggcaaattgtggccctcagcctcctgagaatatctgcaatcagtttgataatagtggacattaacactatttaagccaaacattatcctgaattaaaaaaaaatctgttcttcccattattagacctatgttatcaaaaaattgttttcaattattgttgttatagtttgaatttcatcaataaattttttttctcttattaaatacttacatggtatcctcaattttaccttttggttcacaaagcctaaaatatttactctctggtcctttacagaaaaagtttgccagctcccatcctagaatgttagactagtgaccttctttgttctttccctacatttcaccaatcctggtaggcaatacgaatgagcaaaccttagatatgttttaattcattgataattgatcacaggtggaagtaatgatgatgaataatttaaggattgttttgttggttcccttcaaatagtggggaagaataaggattggtgtttttcttgacttaagcgttactcataattatggagctgttaccataggtccttgtcttcccaattgagagaaggtaattattcgtaaatgtgtcctggattgtgcctactgcatatgtaataaaggtttctaggtatgtcacaaggaaaaatcgaattacgaaagttaccaggtgagaaaatgttaagccctggctcttacggcctgtttacctatgcacattagctagaatcatagttattactgagcgggagctctcacgtaatatataatacaactttgatattcataaatgcttgagtaagtagaacagtttaaataaagttaagagtaaattggggtggaaacaagttggttgaacttcttgattttccaacaaggtattttgttcaaaaagagatttctgttaaatacctattaatggttctttgccttttaaatttaactttaatcattttgtaatttgttcttgaatctctgttacttaaaattccaactcaaaaatgttacagcttgcctagaaattttatttgaccataatggaagtatcacacctgttttttatttcctcagcctcagtgggcctgaaccatggctgtagtgcgtgtttttattgttgatggtttttattaatttatagttaatacatgattctgtgttacttcttaaatgccagaatgtcttattgacaagattagacaagttagttaagtttagacaaacttaaaatcagattttaagaatacaggtagctgggtgtgatggctcacatctgtaatccaagcactttgggaggctgaggccagagaattgcttgagcctaggatttcaagaccattctggacaacatgatgaaaccctgtctctacaaaaaaaaaaaaaaatacaaaaaaaatacaaaaaattatttggtcatggtggcacatgcctgtagtcccatctacttgggaggctgaggtgggaggatcacctgagcccaggaagtcaaggctgcagtaagctgtttttaaatgattcagtggaagttctccttgtcagtgctaccatgctttgttttaactaatttaccaaacccagcatgttaggcctttatttcactttctgaagtattcctttgtttatctttttaaaagtagagtcaatcccaaggcccaaggggtgtttaaacttagtttacatttcatatggaaatgacacgattttattctaatgtaaaatgttttgtaaaatagaacacattaattatacctcagctatgtttccacctcctgtctaattaacataactcgaggttcccagaacatttctacatgggaaaaatttgaaaaaagtaaatctgttacttgaataaatagtcctatagtctagcaatataactttaagatttacataacagaatgaaagtcagaattgtattttatggcattaaataaattaactttatttctgtctatatcaacatccaaagtttattaggaatttatttaaagaataataaaagcaataggacctaacatttaatgagtgcttactgtgtcaaataccattctaaacagtttacatgtattcttatttatttttaagtacaatataaatcataggtattgagcatgcaaataaataaatagtaaggatattaggcatagatccacagatacactggtagagtgattttcgaaggcatttcggccgtacagatcttcaccaaacccattaattttatgcttgggaatttatttgaaaaaataactcagaagttaagaaaaatatgtaggcataaaagtgttcaataaagccttatttattatagtgaaaaattgtaaagagtctaaatattcaacagtagaataagaaagtaaatgctatattaacttgaagggaatatattctagccataaaataaaaaatatgttaagcttacgaaatttattactgttacaagtataaaaggaattctgttttaagtctttgttttaggagattacattacacacacacatatatatataaaacatatatataaaaaacatatatacatataaaacatatatatataaaacatatatatatatatatatatatatatatatatatatatggtctggctggacagtgatgaattcactgaagaccaatcagtagttcatgattgtccttaatgtttctatagacataaaatttctattgaaatatttttataccacttacctgcacacttattatatattatcctgtaatacattttatctttttatatgtatgttctgtcccctaaattaggtagtaaatttcttaagcatagtggtcttacctcatagaatgtctagccttcattaggtacccagcatcatgtttgctgcccgtgaccactcagagttcatcattataaccattgttactgatctgtgtgctcgtcttttgtccctccccttgttatcattcatttattgtttataacatatatacatatatatatatatacacacacactacatgcaaggcattttattgggaatacagtgcactcaaaataaattgaaagccactagagggaatgagagaacaataaaagaatttgggtatgatatggtgaaagtgaggtataaggatgtttaatctgacaatccagtgtagtttcacttgtgtaagcaggacataaactgttaggcctaagaataggattgaatcttttcttaataaatttttcggtgtaacatatatgttgcttcctcttactccaagagttcacaaaacagatgaatctcttatgatgtagatggtttcaaatatgcatctatatagctgacatttattttaactaacattattgagtgtctacagtatgccaagcatttcatcttattacattttttcttaccaaaattctatagcaaagttgttatgatctccgttttgcaaattaggaaatagagattcatggaagattaaattatttacccagggttatactagaaagtaaaagtcagaaccaaatattctgattccaaatctcttgtctactgaaggaaagtttaaacatgtatcttttgttgacacatgattgttttgaaaattactttttctctgattttttttttgcattctttttagtgccagtaattttgaatatagggtatagcatgtattagcattttcttggcatttcttcttggtaagtagtttctgttttgtttcctttttgttagtcaccgttacttcatccccaatccgaggagcaggagatggaatggaaactgaggaaccacctaaatctgttgaagttacctccggagtccaatctagaaagcatcatagtcttcagagtccatggaagaaagcagttccatcagagagcccaggagttcttcagctagggaaaatgctcactgaaaaagcaatggaagttaaagctgtaagaatattagttcccaaagctgctataactcatgatatccccaacaaaaatacaaaggttaagtctctgggacatcataaaggagaattccttggtcagtcagagggagttatagaacctaataaggaactctcagaggtaaagaatgtattggaaaagctcaagaattctgaaagaaggttactacaggacaaagaaggtctttcaaaccagctccgtgtacagacagaggtaagaagagccttaatcgataaaatgagtactactctttacgtctggaccttttaaacgtgcatgttagaaaactacatttctttatgggaatgtcattcatcctagcttgtcagttctctaaaatgcttcctcttaaatttctcattctttctcagttctctagggatactttatattgggaacttatactctaaacctcattgaagatggaggtgtgaggtgctttggacaagaccaccaataagttgtaaaagtaggttacaattataaactgccagaccaaagattgaccaagtcaggcatagtaattgaccagcagtccttgttttaaggatccgtaaattccaagtagttttgcttgtgtatacgggatacttggaataaagagaatggcgatataacttactgtgtcttcattgtaaatgaaaaaaatctgtagcccttaagtgtgttgctttaatctttgcatcttagtaaaaattgccttgccccttcccttgtttctctattagaccatgcatcttttggctagatacaagtcttcataagtgagaccatggttagtgtttttatacaaatatatttttaaataactaatttctcattacaaaatgtagtacaaatttatgtgtaaaaattttagaaaatacagaaaaacacaatgaaaatagtgccacctgaatcatttcatccagctatacgtgcataaccatatacattgagttcatttagtgtcacaacccacttttttcagttattaatgttctgccatgtcacagaatattctattacagtgtcattgttaatagtaacagtgttcttcaatagctataccatataccaataactgttattggatatcttttaattttttgctcttttcagtaatgatgtaaagaacatacttagaaacatactggattactttgctttattttttaaaagtaaattcttaggatgcaatacactaacttataaatgtttaataaaaaacataaaacattctctgtcatattttttatcaaaatatattggttttgttttaattttttttcctttaagtgttgactagaagcaatttgttattttcataattctttttactcttactacaagaggctcagtttattaccacatggactgtggatatagatgtatggagagaagtagagagagatggtttgtatatcgtatggaacttaaatatttaattttactttttgatagaaacttcaagtcacggaggtccaaaattacacagaaacacagtctctttttgttaattttgttacattaaagttagtgatattactttgagcttgttgtattgattacgttctcttctaggtaaatcgtgagttaaaaaagttactggtggcttctgttggggatgatcttcagtatcactttgaacgtctagcccgtgagaaaaatcagcttattttagaaaatgaagccctaggtcgaaacacagctcagctttctgaacagttagaacgtatgtcaatacagtgtgatgtatggcgaagtaaattccttgcaagcaggtattttctacagcaaatagtatttcacttcctagtttttgctccatcaggtttttgatctataacacaagaaagtagattgtagtgtgaaaatttctgactaaggtcatcagagtacttcatttaagatgtggactctctctcctctggatagtcacacagtctccctaaatgaagaagtgatataaggatcatcccttattcctgagttctagtttactgtatagtaaaaatataatgtttaagactgaaacaaaactgtaaactcagacatctagtaaacattaaaatcacaaaaagccaaactaaattatttttccccattcaaatatttggactccccaagataatattattcattctaaatgcgcttttctcattgttcttttaactatataataaagcttcccaacgtttttctctctatgcacaaatagaaaattataacatttttatgacatactggatgaggctactctcatatggcagcaaaaaccctggggttctcatccaggcctctcaacacactggtggttgggaaactgctatatagtatgattctttgtctatttatcccctccctgcctcaactgatagttactagataacaagatctggatgttatccatctgtgtatttctggaacttagcaaaatactttatagagtatgtttcataactgttgatttaaattgaatcatctggagatttctcataaaacaaccaaaggtttacaggttgtatttgaggaaccattgattttgatgaatacatttttaggaaaatgttttttcatgtcttaatatctctgacactttgtagtagtagttcactctctttaacagtcttttgtttatctcctaattgtgctagttcattatgctatttggaaaaatgaactatttattcacttagaatgaaagttaattgagttaattctcattgtacattttaagaggcaaatcatgaatatattgtacaaatttttgcaatatgcaactttttaacatcctgatcaacaccaatagtaacatttcattagatttttaaataaaaattaaatatgactttattggtattttaattgatgtaatcttctaatgtcaacattgttttcattttgaggaatttggtagtaactgcagtctcagacttaaattttaattttaaatttttcagccgattaaccatacttgaacattttgcttcaattccatcaatagaaaactggttaaataaaattttgtgtatccaatcagtagaaaacatgaagctaatttttgaaaaaagggaatgagatagctgtatatgtgctaatatggataagtctctaagataaattattaaatgaaaaactaagatttagaaaagttcgtattcagtatctctttttgtaaataaagtggataaatttatttttaacacatgtatatgttgaaatatacataaatttttttttgagaagtgtaaaaaaactttgttgactgcatataaaaggataggtatgctgggcatgacaaaagactttatataaatctttttatattaatatttttctgggggcaaagaggtaattgagtgaagaagataatttagttttgtttgtctctttaagtttttctgtatttaaaaatatttaataattttttctttcaaattttggtcaatctagagtaagattgagatgtactccaaaagtcattatataggaaagttgaataactcttgcctttgtcattgtctaaatgaatattttaactgaatccctttaatgaactctaagctaataagcatttttaatgctctttagctaaaatttaaaaactgtgaagtaactatactgttaaatctttgttagcttctgaaagtgacagtcacaaagtagtatattcaattttttacactgtattattgtcagcaaatttatatgtaagattttaatctttttcagggtaatggcagatgagttaaccaactcaagagcagctttacagcgtcaaaaccgtgatgcacacggggctatacaagatctcctaagtgaacgggaacagtttcgtcaagaaatgatagctacccagaagtatggcacttgtttacattctgaactcttctgctttctcctgcaaattaagttattgtagttttggtttttttgtttgtttgtttttgttttgggtgtgtctacatttgataacttactgagcatatacttttagtagcattttaaaatagatgctctgggagggaagaggactgaaaaaatagaaggcatgcttttcacattcttaattggggaaataattagttatatctgtagtagaaggattctctggatttaaaagcaattgctggtaatagttgtagtcgtacagttttcggtagaagccaaggagtgtacctgtctctcctgtggaaagagatctttttgaagacttcctacagtattagagcttgttttcatgtccatatactccagaactatcaaaattgatggtcttccttaaaagccttttgcatttttatatagttgatttattacacgtagaatcagtaagtgtcaaagagcaaattataggggaaattagaagaatgaaaacacaagaaacgtctaaccagtttaatcaggaaaaaaagagaagatatacattaccagtatcaggaatgaaggggggggtacaatatagactctatacacataaaaaagataatacagaaatgttatgaacaaatccatgtcaataaattcagtaatttagatgaaatggacaaactccatgaaagacaaactaccaaaggttactcaagaacaaatagataacctgaatagccctaacctattaaagcaaatataatttatagttaaaaattaaatattttccagtaaaggaaattccaggtctagatggattcactgatgaatgctagtaaacatctaaggaagacataaaaccaaacttataaaaattattctagaaaacagaagagaaggaaacaatttccagctcatttcatgagaccagcattgtcttgatatcagaaccattagccaaaacccaccaactaatatctctaatgaacataaatgcaaaaatccttaacagaatttcagtgaatcaagtccaacaatacagaaaaagttttatacattttgaccaagtaaagtgaatcccaggaattgtagattggtttagcattcaagaatcaattaatgtaactcaccaaaaaagaaaaaccgtatgaatatccccatagttgcacaaattatgtaagtagttcctatactaaaagatgagaacaaagaaaagtactgtttgttaaatgattttcatacaacaacctagtagattaacatatgctttctgtagtctaacttacttgactaagacatccgaatttatggaactctgagagagaaagggatcagagaaagatgttatataatttcagaaatatttgtattacctatttactattattaatttttacattttgctctcttactatgtccggtgttcatgtgtgttctatgcagattattggaggagctcttagtttccttgcaatggggaagagagcaaacttactcccctagtgtacaaccccacagcacagcagagctagcattaacaaatcacaagttggcaaaagcagtaaattctcatcttctgggaaatgttggcattaacaatcaaaaaaagattccatcaacagttgaattctgcagcaccccagctgagaaaatggctgaaacggtaaaatattttcttttgtgatctatggaacttctaacactgtccttttactgaaaggtgacatatcatggaaagcatttggcattaggaattaggaaatgtgggatctaaaccactcatgctattgagtgtgttatcttggagaaaattatttcctcttctgcgctttaatattttctaacactactgttctatttttaaggacaaaaaaagtaattgttttgaaagaggtcctatgttttagctattaagtcactgataatccttttcatgagttcattttgatataaaaaccactgtgtagaatttttaatgtagattaaattagtagattcatagattacttctgatctaagaaattacttaatttccacatatagatggaaatgtatcaaatactacagtacagatagtatagtcctggatgaattcagggtccatgcagctggcttgtcaaatactcatctcacatgtctgtgacaacaaccaagttcaccttcgttacaactctcatgtccccatctgggtccctgcctgtcgccataactcttgcactattaaaatcttcaactcaacatctctgtctctgtgatctgtgatctcaactttttttctttccaactctgattcttcattctgactccctggatgtgaacacatctttgatcatataattgtttttattcccttggtccctatatttttttatgtatctcatcagctcactcttttagtttctcttcccacatagctttcctagactctattcataagtgccttactgccttatcttcctctccgagtatgctgcaaaccccagtcctgtgtcagttcagctgtttgcctttttatttcagtacccatcaaatactacctcacattcagcagatgactttccttcctaatccacagaagaaaaaggggacagaggcagaaaactgcctgaaggtttcattagatatctagaagcctatctgtatggcagcatacatttctctcagaggaaaaggtgtccttcctcttctcctaagcatacctcccctctaggccctggcttcaccctcaacagttattccttctctctgttggctctttccttttggcttaagaacatgtccaagcatcattcatctaaaaaagaaaaatcttccctctattgtaagatgtctggatatggctttatcaccttcctttcacatccaagaatcttggacaagttgtccagacatgtttgtacttaaacaccatccattcctcaattcctaccgtcacttaaatctgtagacttcctgccccactattctcagtaagtactcttaaaaaggtcatgaacatttactatcatattatactgtatcgagcattccttcctggaaactcccttgacctttgtaacatcactctttcttggccctgatgctacctctctgagctcttcttcatagacttttttcctcctttagatgttcatgtttcataggaatctgtgttccccttttcaaaatctcttcgttcctaaacaccatactcttgaaacgattcactacttttgtgaccattgtttctaagtttttgagggggaggggcatcctcttcctgtgacccctcttgagctttctttacataacatactttctctattctcttggtgttattctgtttaccatagctttatgcttgtgacttttccatctcagacttttttctgagtctgagagatttatatccagccaggtatttccatctacttgttccacagatggctaaaaatataatctcttttctccttgcttttgcatttgtacaaccccccacccctaaaaatctcctccttttcctgtattccctatcttgatgaattatacctactctatagtgctgttttcagatttcgataaaaaacacatataaagcctgcagcagtttccaatatattgtaatttctcaataaatggtagctatcgtttttactatttccttcattcccctagtcctgttgattttacagatcttaccagtttttttctaatttatcccctcccaagttcaaacacctgacttccagcctagcccactgcagttgccccctcactgatatccctgccctccttcttagctgctcctgcccacccactactggcagagagttatttcagaaggccaaatcagtcatcaaacagttcccagtctccctcattattgaatcagaattcattcatattgtatagaaggctttttataatctttcttccatctccccttctcaagaatcatttcccaagtgtcactacccactgcacttaacattccagcagggtttaaccacttttcatgatgcacataggccattgtatctcatgcctctgtacatactttttcttgtctggactaccctccccacacctcttttgttgcccaacctctgtaccacctttaagaacctgccttctctgaatcttgctggcaatctgaagtgttccttctccatccttccattgtactttgcacttatatctgtaactgctctttactgtattaaattataatagttttattttccatccctctcccaaattgtaaactcctaaagggctggggactttgtgtttttatgtttcctcaaggtctggcataatcccttgcacatactaagtgctcagctatttactgaatgagtcagtacctaaaattaatcatttttatccaaaattttgtttctccttttctattctctttgttgggaaattgtgtcactgcctacttagttgctgccagtagcatttggtatagttgaccactccctctttctcgaactattctttccgaggtttatataactttatagcttacaggcttttctcttttatccaaccattttatttcactatacaatgttaggtatcctcagggcttgatttagatccccttcttctcccagacctttatccaccacattctcctatttaacaaaactgacagcccttcttccttagtgtctcttaaacttttcagtcccattgcttcaaggtgccatcatttcttagctagattattacaataacctccctttttctgttcttatgtctgcttatgcatactgcttcccccatcccccacactgtgtatagaatgatctctctgaaaggcaccctgcataaaatccttccccatcactttcaggctaaaatacagaaacctttctgttcatattagtgggtcagtctcctgctcctgaattcccttagcattttgtttctcgctctataaagacctataatgtaataacatctttatagtatttgagaacttattttctcctctaaatttataagcaatgttaaggtaagcccttcatctttgcttatcctctaataccaaacaaacttccataaaaatagaaggatctcaaaaactaaattgaaaaagcagtctagttgaaaaatagaggtgctaaagtaagttgatggctcttaaatgatgccaggacattcttagagtagtgatggctctttgggtttggtggtaacttagaagggaaaaaaaaaatctgcaggaccacatgaccgctagggaaacaggcatcaccaaccattccagaaagctgctttgaacaagccttatataagaaagagagaaagcacttttcccaattcatttcagaattctttccaattgcagtgcttgctacctttgtaccataacccaaacacatcatgtggtgatgactgggaaaataggaacatgagaatcaagagctgtgagccaggcacgttatccctgcccttaactggagaaattttttcagctcaagagttcctgttttgggtctcagtaaaggagacagattaggaaaaatcagagcagaagaagaattaggagagcattgtgttgtggaacccaggaaacaaaaagtggctgtaatcataaaatactgcatataaattagaaaaagagaaatgaaaagccattgatactacagataaaaagttatcaaggattttgaaatatcgtttccatagaagaataaaaacaaaatcctgattctgagcagttgaatgaaagattgaagaggggaagtagtaagtccattttggttaaggaaaagaaattgacatcacttaatgatataattgacatgtaaaaaaactgacctcctggggggccgaggcaggcagatcacaaggtcaggagatcgagaccatcctagctaacacagtgaaaccccatctctattaaaaatacaaaaaatgagccgggcatggtggcgggcgcctatagtcccagctactcgggaggcagaggcaggagaatggcgtgaacccaggaggcagagctttcagtgagccgagatcgcgccactgcactccagcctgggccacagagcgagactccatctcaaaaaaaaaaaaaaaaagacataatgatataacctcattttcttctatgttttcctgctttcctaccaatatctgtaaaacattaacgtcattatttaaaaaaatatgtaacctagataatatagtaatcagacatcattgttaaatttacagcttaaggaagtaagttgtcttttcaatcagattagtcattctgtttttttagtaatagttatatattaatgaagtgaaactttataggtaggtatacatcaatgaaatcttaggcttttaccatctatattgcatacttctgacattatatcttattttccttaggttctaagaattttagatccagttacctgcaaagagagttcacctgataatccattttttgagtcttcaccaaccaccttacttgctacaaagaaaaatattggacgatttcatccctatactagatatgaaaatataactttcaattgctgcaatcactgccggggagaactgattgccctttaacagtcaatatgttggaggcatgctaaggtacttccttattacccaagagtcattattatttgggagctggggttcttacaatgctagaaataatatcacttcctatttacataatgtatacacccaaagatattttatgtactagactccagattaccctttcttaataaatatctcagggtaaggaaagaaagaaactgtatagatatatttaaaatagagaatactttccaagcaatacatgatacttttcctaaaagactctaaaagaaaaagattctgtaactctcttttagcaccaaattattgtttatcttgctggatattttatatgaacagtgttaatttagatgcactaaagcaaaggtaggcaaactacaaccatgagtcaaacatggccacacccattcatgtgctattgtctaagctggttttgcactacaactgcagagttgaatagatgcagcagatcctttacagaaaaagttttctgacctcaattctaaagtaattgtagtagggagctggaggactttctttccctttatggtaattttttgagctacaaaagagccttgcagaaatgggtgaagggattaatcttttaaaaataaatgctatatattaggaaaataaaaaatattttagagccaagttaacaagtacttcagcaaaacatgctagttttatgcaggggattctgtattccaaatggatacaatccgacatatataaaagaaacagattcttaactattgactcttatttagcaaatgcaacagacaagaatatccaacttgatatttataaaaggtagactttttccaaaagtgtataagctcaaagaaaaaatgcaacctgtcaattaatatatactatgtaatatatattattgtgtatttatgattagccatcataaatgcccattgcttggcctttaagaataatcacaaaatatttatattaaattatacaaatttgttgcagaagtgcctgtgagagaaatcttcaaaagacaaacctggtcaaataataataattttaatgtcaatgattttttttgtctgactcatctgagttatatttagttttcaagtggcaataaatttatctaccttctttattgcgactattccttttttcccccagaattagtgctttggtttaggtctttgtctagcttaactacttccaattgattcttcagccttttcttttaggtttacttactataaaagtctcagaagaaagcataaggggaaagcttcgtgacattgtatttggcaatgatttcttgaatatgacaacagaagcacaggcaacaaaagaaaaaatagataaattgaatttcatcaaaatttcaaatttttgtgcattaaaagatgcagtgaaaaggcaacacagagaatgggagaaaatatttgcaaatcatatatctgataactgtctagtgtccagaatatataaagcactcctacaactcaaccaccaaaaaacaacccaataaaaattagcaaaggggctgggcatggtggctcatgcctgtaatcctagcactttgggaggctgaggcagtcagatcacctgaggccaggagttcaagaccagccgagccaagatggcgaaaccccatctctactaagaatacaaaaaattggcctggcgcagtggctcacgcctgtaatcccagcactttgggaggccgaggtgggtgggtcacctgaggttaggagttcaagatcagcctggccaagatggtgaaacccccgtctctactaaaaatacaaaaaattagttgggcatggtggcgggcacctgtactcccagctactcgggaggctgaggcagagaattgcttgaacctgggaggcggaggttgtagtgagccgagatcgcgccgctgcactccagcctgggtgacggagcgaaactctgtctcaaaaaaaaaaagaatacaaaaaataagccgtgtgtggtagtggacgcctgtatacccagctactggagagggtgaggcaggcgaatttcttgaacctgggaggtggaggctgcagtgagccgagatcgcgccattacactccagcctgggcaacaagagtgaaacttcctctcaaaaaaaaacaaaaacaaaaaaaattagcaaaggacctgaatagacatttctccaaaaaggatatatagatggccaataagcacatcaaaagatgctcagcataactactcattaaggaaatgcaaattaataccacttcacatccattaggatggcagttatcaaaaaagcaaattataaatgtcaaagatgtggagaaattggaacccctatgcattgtttgtgggaatgtaaaatgttgaaaacagtgtggcagatcctcaaaatattaaacatagagttaccatatggcctagcaattctgcttctaggtagattcccaaaagaaagcagaaactagaataggtatttgtacaacagtgttcacagctgcattattcacaatagccaaaaggtggatgtaacacagtgtccatcgatggatgaatagataaacaaaatctggtatatacatgtgaagaaatactattcagccttaaggaatgaaatttgatgctacaatgtagatgaacctttagaatattatactaagtgaaataagtcagacacaaaaagtcaaatgtcaaatgattccatttatatgagttcctagaagagacaaatttgtagagatggaaagcagaatagtggttatcagggactggagagagtgtagaatgggaagtttttatttagtgggtatagaattagagattgggatgacaaaaatgttctggagataaacagtgatgatggttgtacaacaatgtcagtctacttaatgctactgcattgtacatttaaaaaatatttaaaatggtaaattttacacgttacaattaaaaaactaaaaaaaaattatatacacttttgtaaccacaaactcgtggcacacttctgcaactgttggtttaacagtgtcaataacaataataataaagataagagttagtgagctaaatttaaaaaataaaaaagatctcaaatcagcaatctaacataacaccttaaggaaataaaaaaagaactaaacccaatgtgagaagaaggaaggaaattaagattagagtgcagacaaatagagaatagaaaaacaagagagatcaaagaagtcaacagttagttctttaaaaagaaagaccaaattgacaaatctgtagccatactgactaagaaaaataaaacaggtaaaactaaaatcagaaatgaaagtggggacattattagtcaccttacataaagaaaaactgtacaccaataaactaggtaaactagtttacagacaaattcctagaaagacatgtattagtccactctcatggtgctacaaagaaacctgagtaatttataaaggaaagaggttttcaaaaagggagaattattctgaggctagaccatgtgatgcttttacagtgcacttaaaaaaaattttttttcccacacaagagatttctaagtgtctaaattacactttttcttaaaaaacccagagtagcttctgttgcaatagctattaatgaagaaaacagaattcagtcaactgagaagaaaaaaacttttgctcaaaaagacaaggtcctaagaaataaacaaaaacataaaggccttttaaatacaagcatgcacacatgcacacatacatttacatatcttggatgttagcttttaattaagctgacttaaccattgagctcctaaaaattatattttccttcccagaggcctctcagcaggaatggacccaataccttccatttttaagtttacatggtatcaaaaggagtaagacagataaacaagtggagacaaattttggacaacacaaggggaagtgcactcgggcaaaacagattcaaaacctgatctcaatcaaaatgcaaagcgggtgtataaccaagccttattattgcttcccgtggcagtgccagacaaatggtttaacaagcctagatgggaaaacaataggctcccagcataccattcagttaactcaccctttgagttcgtccgctcctgatctccattctaacccagcattgtaagggttgtgcacttttgagcacaggacagccttcaagggggtccctgggaaaatctcacctgcagctgctgggatccccctaaagactgtctccttgcaagccactggccactgaatgcagcaccattccagtctctcctggctggcacgccaaattttgttcccagaccaaactgaggtttgggctgctgtttctcgtggcccaataacgagatgcaaatgaactggggaggaagggagttttcatttctgcaaccggttacagggagaaggcctggaaattatcaccagaccaattcaaaattacaaagttttccagagcttatataccttctaagctatatgtccatgtgtaagtgtgcattcatctaaggatgtaagtgattaacttcttttaatctataactaaggtctgagtcctgaaggccttcctctggagcctcagtaaatttacttaatctaaatgggtccaggtgctggggcagttacccttgtctcctgctaaatcacggaggtttggggagttccttcagacccccgataaacttgtttgtggaggcctggggagtttcttcagacccacaataaaacttgttcaatcctaaatgggccctgttaagaattcctgtattattttgtcatgctttaaggcccaggaaagacctaggcaaaactcttgatgggcttttgtggcatcccagcctttgtataaggagactgacttttaatatttaacttaacccttcagtcagtagtgaaacagtcgttatggaggcctgcattagtgagacctggcctgccacaatcctgtgttcatgtattgaaagactgtattattaagatggcagtactacccaaagcagtctacagattcactgagagccctatcaaaattccaacagcctttttgaaaaatggaaaagcttaccatcaaactcatatggaattgtaaacgccgtgaatagccaaaacaatgcggaaaaggccaaagttggaggactgacacttcccaatttcaaaacttactataaaactacagtggtctaaacagtgggctgttggcacaagtacagatgatactaacatacagatcaatagaatagaattgaggcttcagaaataaacccatacatctatggccaactgactttcaacaaatgatgctgcaataactgaatgtacacatgcaaaaaaaaagttgaacctctatgtgatattgcgatagaagaaatacatattttggtcttgtaccagtttcctggcacatagctcctaaaacccttgcaacatcccaagtccccaagctgtgagtatctttgtatgctaatgaaatgactaatgtctgggggatctggatggggggaagttgccaggaggaaccaaccaagtaattagagagtagacctccaggggagggggaagtcctgaaggttaagttgattaccagtagccaatgatttaatcagtcatgccttcataatgaagcccctccataaaaacccaaaaggtttagacagctttctaggttgctgaacatgtgcaggtaccgagagcatggaagttccacgacccttcctccataccttgccccacgaatctcttcaatctggctattcctgagttgcatccttttaaaaagagaaacagaagtgtttctctgagttctgtgagcgattctagcaaagtactgtgggaactgtaaccaggggacctattatttgcaattgatgtctgaagtggggggcagtttcatgggactgagcctgggtgtatggtctgcattaactctggttagcgtcagaattgaattgtagaatacctacttggtgtctgcagagaacggggaaattgcttggtcttggggaaaacaacctaaacatctggtgtcagaagtgatgtactgagtattgagagtatacaaggaaaaagtttgttttttcttactctacctcacgccatatataaaaattaagtaaaaacgaatcaaactggccaggtgcagtgacttacacctgtaatcccagcactttgggaggctgaggcaggtggatcagctgaggtcaggagtttgagaccagcctgaccaacatggcgaaaccccgtctctactaaaaataaaaaaaaattagctgggcatggtggcgggtgcctgtaatcccagctactcagcaggctgaggcaggagaatcacttgaacccgggaggtggaggttgcagtgagctgagatgtgccacggcactccagcctgggagactgtgagactgtctaagggaaaaaaaaaaacaactttgtctcttttttttgagatacggtctcactctgtcacccaggctggagtgcagtgatgcaatcttggctcactgcaacctccacttctggggttcaagcgattctcatgcctcagcctcctgagtagctgggactacaggtgcatggcaccatgcccaactaatttttgtatttttagtagagacggggtttcgccatgttggccaggccggtctcaaactcctggcctcaagtgatcctcctgcctcaacctcccaaagtgctaggattacaggcgtgagccaccgcacccagccagaagtttgtcttttaaactttgccagaatgcttacagtgactgtccattctccatcacacttgtatgcttacctttgtccttcaccccttacatgctcttacatgtatcagaagtactattcctctacacactggattcttgtatactcttaaatatcacatattctaccaaggaatgtaatctttataatataactgagagaaaggattttgcaaccatacagatcagtctatgtgaacaaaatattcatgtctatatagtttccttctctgcagaacgacactaatagggttgtcatatgattacattatttatataaagcatttataatacattttaaaatgttttaagctctcaataaaagttggctaattttgtaacatacctacctaaaatagtattacacataattgctattttatcatttcaagttttatttcagattcggggatacatatgtgcgttagttacatgggtatgttgcatgttgctgagggtccgggtatgattggtcccatcacccaggtaaagaacatagtacccaatagttagtttttcaacccttgctcccttccctcacccccaggagtccccagtgtctactggggacatctttatgtccatgaatacacaatgtttagctctcacatatagggtgtattttttaaggtactaacgggtggaattaggcctaccctattgcttagcttgccatgattattcaaatccaaagttgacataaataggactttaaggccttgaaccaggcttgtttaaggagtcactccttcagccttatgaaatgttccattgtaattttttaaaaataataggaagtatgaatagaaatctgtacctttcttgtgttttctcctagaaacgttaataaaataatttagaagtagaaggacatagaattcattcgttgttcaatttgttgcacagactaagagatggcacaacacattacaacactgtgagaaaaaaatttattttgttctagtattaaaaaaacaaattcactgtcaataaaagataaataccatttccataatttagaatacaaccaaagtacacagaccctaagaaatcatatccaaaattttgatagcagctgcccactgaaatatttaatagaaactttcagttataatgatcagtaaaacgaaaaggtttggcttctgacatatataggtggtgctgtaactgtttagaacgcttagcttctagtcggagctgtctagttctctctctgacagcttgttgctctgccattttttccatccgtttccttcttaaccatctgtagaaacaggcatgatcagatttggtgagtatcaacctgaatacactcttcatgctataaagttactattatagacaaaataaatggacatttctttacaatgaaatactgtcacagcacaaatttttaagtattaactgaaaaatgtaaagattacacccaaggctcatacaagaaaggaccgttagatttggggtcaaatgtttgaaattgtctgtcttacaatgaaactgccaacttaattggttttttaataataaacactattttatgtgtgctgtagatcctattctttttttagaaacaggatttcttactatttggtagattccaaataacttactctttgtaactagctgtattctaaaacattacttagctaggttaagaatactatcatgcagaaatgctgccttactcttcttataggtaaattatagagcttttaagtccacaaaatagttcttaaaatgaaaagtaagccaaacatgaaaacatcaaaagcaggaaaggaaaagtccacattctaacaaattcaagtcttaaaccttgtttaaataatagcaaaaataactgcatatacatatatacctggtatgtaagtgtgtatgtggtatgtttgtgtgtgtgtgtgtgtgtatatgcacatacatacacctggttttgttgttttttttttttcagaataaacaactaaataactgtattagaaaaaaaagaaacttactaaatatcataatctgatgatatgtggtcctgaattggctactagtttaagcaaataaactgtaagtcatttatgggttagttggggaataaatggatatgggctggatattcggtaatatcattaatgaaaagcagattgcagaaatacagtatgatctcagtattttgaaattgtaaatacatgtacagacaaatacttagacagtatgcatactggtgttaacagtcacaatttctgggtgatgaaaatgtaacttgaaaccgctccatttctacaatgcacatttactgtttctgttataataaaagggtatgttagaaaaacaaaaaggaggctgggcatggtggctcatgcctctaatctcagcactttgggaggccaaggtgggcggatcacttgaggtctggagtttgagaccagcctgagcaacatggtgagaccccatctctacaaaaaaaatataaaaattagccaggtgtggtggtgcacacctgtggtcccagctacttgggaggctgaggtgggaaaatcacttgaacctgggagggtgaggttgcagtgagctgagatcatgccactgcactccagcctgggtgacaggaaaagaaaaaggaaggaagagaaaaaagaaggaaagagcaaaagagacgaaagaatgaaatgaacttcaaacaattggactcaatattcacatttggtcccccaactctccccacacttgctagcaaaaatatgaagccacatctgtattgtcagaattaggcaatgcagtgtcttacccaaataactaaaaaatatcaggtttgccttaaattaccaaaatatgtacccaaatctcctttggtctatacagattttcctccttagtccacctgcctttcttttactggtaaatgcaacttttattggttgcatttatttgtaaattcagtttttctgagggctatgtaggagaagctgtaaccaatcttcaacccatttctcacagaaataagtaaacaataaatgataaggtatcaaaggctatcacactggtgccataagaaataatttaagtattgaaaagtatcttgaagaaaaattggtatgcatatatatatataactccatatatataatatatataatagagttaaagaattatacatttttaaaagcatgaatttaaaattgaataggtacgtgctgtaagagaaaacattttgagggttttttttttccaatcttaattgatgatataacttttaaaatgaacatgaggaaggaggaggggggaaatgccctgcctttaacttactgtttaaaggccctttcccggccttctgttcctttaaggaagaataaacattcctcttgctttcttagttcttctgtctgtctttctttcatctgctcttcgtgcttttttttaagccataatcgaaaagcttgttgtggatctctgttttcctgctgattagaaaaacaagctttacttagtttagataaacaagaactacattttgaagccctgcttatgggatcctacaagaatatatttcctactcttcaatttttcataataatgccagcctcattacctgcattcctagtatccaaaccaaatacatcacgcttaagttttaagaatatctttcagcagttacttaaaatggctaagcccatttttcaaaactgtagttcctattgtaaagggtggccataaggattttcagtcataagaattttcttataaagatagcagccatgataattttaacataagaaaaagctagtaggagtggcttatttcgtggtccctcaaagttcatgatggatagtatcttcagggaattttcaaaagttcaaagagctcttatttggaggaataaaggagagaaagaagacagatttggtactctttacccttgggaaaagtgtcacctcatgtggattcctggctagaatgcaaaaggaaaagatacattcatttaatacttcccccaaatataagctttgtgattgagcttatatcttgcatttccctcatctgttgcctatatcttgcattttttcccttgtttgtaacccacattgccaaatatgctctagtctaatttagaagattattcaggatctttgatgcacaactgaactttgtggagaagacccctggatctaaagaatcattgccaaacacctggaagtctgggaattgctagagatgacataaaaatgttcaatcgggagttatagatcaaaagagtccagatacaaagtaatagataggaggaataagttctggtgttctattacacagtagagtgactacagttaacaataccgtatatttcaaaataatgaggagaggatttttgaatgttctcatcataaagaaatgacaagtgtttgaggtaatatgctaattacacaatgtgtacatgtatcaaaacatcacactgtactccataaatatgtgaaattatgtgtcaattaaatacaattttaaagttaaaatatttttaaagattcaaggattcagggagcaacaggatacatgggtatccccattcttttgttctttcaacagatattcatagtatttactacatagcaggcactaaagtactgggttgcattaataaaattaaggttccctctctcacacattctgtactgtacaatacagtaaccacaagtcataagtggctatttaaataaaatttaaacttcagtttctcagtcatactagctacatttcaagtgcttaacagacacacatggctagcagctactctaatggacagtgcaaatacagaaaatttccatcatcccagaaagttctattggacagtgttctgcacagacaggataaaaataagtgactgactgattgattgactgatctgtctgattcaaaagaaaatatgggaaggagggtaataaacacagcagtgaggagaaaggatggtatttaaatagaaagggaggaagttatgggatatctggagaaaaacagtggtaacaataagagcaaaggagctaagaagggattgtgtttggcatgatcaataaatagcaaagaagtcaaagtgaagctgtagcaaagtagctgaagagtggaagatgaagtcagggaagtagtagggatcaggtaatgtataaccttgctggccatggtaggaactttggatttcattttgagatgagaagccattgggggtttctgagcataagtgacacagtttattcaccattttagaaatatcattctggctgctatgtggaaaactgaatgagggagaggcaaggtagaagggggctgggttattaggcttttgtaacagcccagccaacagaagaaaatagtggtttagattagggtagtgggactctgtatatgcactgaagatagaaccaacataatttgctcaaaaattgaatggatagttttatgtcatgctttaaatgattattttttaaattattccaggtttattagtataataaaaattcaagaaaatatatttttaaaacaaggtaaattacagcagaactatcatcagaatgatagactgcattggtatgcaaatatgtcactgcataagatcatagcaaataactctcaatagtggagggaaccaaaataaaaaattagaggaaaataaaaaattctaaagataaaatatgaattatacacataattagtaatggattaaattatctgattataaaaaaggataaatgactgaattggagacttttgcatccatccatgatatcataattggtatcagatttacccttctgccctaattagctataaagctagataaaatgtatgcagcagcttgataactgagagtaagaaaaaacatgatataacccccatattcaccctggctctgtacttggtgacactttccagacaacggtataggaaggaggagtcatagcatcaagcagtcactagtctcactgggctcatgaaacagataggagtctggggctgctgagacagctgaatttccagggcagggtactagaaatgaagcagtcatgtggagggatgctccaagagtctgtgtgggggtttcccttgggtcttggcaaggcctgggctgcacatgtgtagagtgaggctctgtaaggtctaacagagagtagctgctgttaatgaagaagataataaaggttgcatagttttggagacattggagttccaatccaactatagtgggaatacttcattgcttaccttggtcaaccacttacaaccctaaaaaggccatgctttggaaataagggtcatgtcctagagtaaggaccatgctctaggactaaggacaaaagcaaaataaacccatcctaacaaagcataaaacaaagtctgacaggatcaagagtattccttactaatctaactgcctacaagaaaaaaattcaataccctttaaaggaaaacagtgtattctatatttccttacaacttttatattgaaaagatccacagtctattaaccaatttaaaaaaaatcactggatatctaaagaaacaagaaaatgtgacccataatccagagaaagaggccttcaacagatcgatcctaagatgacatagatattggcatttagatacaaacaggtctaatatttaagaaatgaaaagatgaatataaaaaaggtctaatatgtaagaaatgaacaggtgaatataatgaataaaaagagaatctcagtaaagaaatggaaatttaaaaaaataaactgataggaggatccaagatggccaaataggaacagctccagtctatagctcccagcgtgagtgatgcagaagacgggtgatttctgcatttccaactgaggtaccgggttcatctcactggggcttgtcagacagtgggtgcagcccacagagcacagtggggcatcgcctcacccaggaagcacaaggggtcggggaattccctttcctagccaagggaagctatgacagatggtacctggaaaactgggacactcccaccccaatactacacttttccaacggtcttagcaaacggcacatcagaagattatatcccgcacctggctcagagggtcccactcccacagagcctcactcactgctaacacagcagtctgagatcaaactgcaatgccacagcaaggctaggggagagatgtctgccattgctgaggcttaagtaggtaaacaaagcagctgggaagctccaactgggtggagctgaccacagctcaaggaggcctgcctgcctctgtagactctacctctgggggcaagacacagctgaacaaaaggcagcagaaacttctgcagacttaaacgtcccagtctgacagctttgaagagagtagtgcttttcccagcacggagtttgagatctgagaaaggacagactgcctcctcaagtgggtccctgacgcccaagtaggctaactgggagacacctcccagtaggggccaactgacacctcatacagccgggtgcccctctgagacgaagcttccagaggaaggatcaggcagcaacatttgctgttctgcaatatttgctgttctgcagcctctgctggtgagacccaagcaaaccagggtctggagtggacctccagcaaactccaatagacccacaggtgagggtcctgactgttagaaggaaaactaacaaacagaaaggacatccacaccaaaaccccatctgtacatcaccatcgtcaaagaccaaaggtagataagaccacaaagatggggagaaaccagagtagaaaagctgaaaattctaaaaatcagagtgcctcttctccaaaggaatgcagctcttccccagcaatggaacaaagctggatggagaatgactttgatgagttgagagaagaaggcttcagacaatcggtaataacaaacttctccgagctaaagaaggatgtttgaacccatcgcaaagaagctaaaaaccttgaaaaaaagattagacgaatggctaactagaataaacagtgtagaggagaccttaaatgacccgatggagctgaaaaccatggcacaagaactacgcgatgcatgcacaaccttcagtagccaatttgatcaagtggaagaaagggtatctgtgattgaagatcaaatgaatgaaatgaagtgagaagagaagtttagagaaaaaagggtaaaaagaaatgaacaaagcctccaagaaatatgggactatgtgaaaagaccaaatctacgtctgattggtgtacctgaaagtgacggggagaacggaaccaagttagaaaacactcttctggatatgatccaggagaacttccccaagctagcaaggcaggccaacattcaaattcaggaaatacagcaaataccacaaagatactcctcaagaagagcaactccaagacacataattgtcagatttactaaagttgaaatgaaggaaaaaatgttaagggcagccagagagaaaggttgggttacccacaaagggaagcccatcagactaacagcggatctctcggcagaaactctacaagccagaagagagtgggggccaatattcaacattcttaaagaaaagaattttcaacccagaatttcatatccagccaaactaagcttcataagtgaaggagaaataaaataccttacagacaagcaaatgctgagagattttgtcaccaccaggcctgccctaaaagagctcctgaaggaagcactaaacatggaaaggaacaaccagtaccagccaccacaaaaacatgccaaaatgtaaagaccatcaaggctaggaagaaactgcatcaactaacgagcaaaataaccagctaacatcataatgacaggaccaaatacacacataacaatattaactttagatgtaaatgggctaaatgctccaattaaaagacacagactggcacattggataaagagtcaagacccatcagtgtgctgtattcaggatacccatgtgcagagacacacataggctcaaaataaagggaaggaggaagatctaccaagcaaatggaaaacaaacaaaaaaaaaaaaaagcaggggttgcaatcctagtctctgaaaaaaccagactttaaaccaacaaagatcaaaagatacaaaaaaggccattatataatgatggggtatcaatccaatgagaagagcgaactatcctaaatatatatgcacccaatacaggagcacccagattcataaagcaaacccttagagacctacagagaaacttagactcccacacattaataatgggagactttaacaccccactgttaacattagacagatcaacgagacagaaaattaacaaggatatcaaggaattgaacgcagctctgcaccaagcggacctaatagacatctacagaactccaccccaaatcaacagaatatacattcttctcagcaccacatcacacttattccaaaattgaccacataggtgaaagtaaagcactcctcagcaaatgtaaaaacacagaaattattacaaactgtctctcagaccacagtgcaatcaaactagaacgcaggcttaagaaactcactcaaaaccgctcaactacgtggaaactgaacaacctgctcctgaatgactactgggtagataacgaaatgaaggcagaaataaagatgttctttgaaaccaatgagaacaaagacacaacatacaagaatctctgggacacatttaaagcagtgtgtagagtgaaatttatagcactaaatgcccacaagagaaagcaggaaagatctaaaattgataccctaacatcacaattaaaagaactggagaaacaagagcaaacacattcaaaagctagcagaaggcaagaaataactaagatcagagcagaactgaaggagatagagacaaaagaaacccttcaaaaaaatcaatgaatccaggagctggttttttgaaaagatcagcaaaatcgatagactgctaccaagactaataaagaagaaaagagagaagaatcaaatagatgcaataaaaattgataaaggggatatcaccaccgatcccacagaaatacaaactaccatcagagaatactataaacacctctatgcaaataaactagaaaatctagaagaaatggataaactcctggacacatacaccctcccaagactaaaccaggaagaagctgaatccctgaatagacgaataacaggctctgaaattgaggcaataattaatagcctaccaaccaaaaaaagtccaggaccagacagattcacagccaaattctaccagaggtacaaagaggagcaggtaccattccttctgaaactattccaatcatcagaaaaagagggaatcctccctaactcgttataaggccagcatcatcctgataccaaagcctggcagagacacaacaaaaaaagagaatttttgaccaatacccctgatgaacattgatgcaaaaatcctcaataaaatactggcaaaccaaatccagcagcacatcaaaaagcttatccaccatgatcaagtgggcttcatccctgggatgcaagcctggttcaacgtatgcaaatcaataaacgtaatccatcatctaaacagaaccaaagacaaaaaccacatgattatctcaatagatgcagaaaaggccttcgaaaaaattcaacagccctttatcctaaaaactctcaatgaactaagtattgatgggacgtatctcaaaataatgagagctatttatgagaaatccacagccaatatcatagtgaatgggcaaaactggaagcattccctttgaaaactggcacaagacagggatgccctctctcgccactcctattcaacatagtgttggaagttctggacagggcaatcaggcaggagaaagaaataaagtgtattcaattaggaaaagaggaagtcaaattgtccctgtttgcagatgacatgattgtatatttagaaaccccatcgtctcagcccaaaatctccttaagctgataagcaacttcagcaaaatctcaggatacaaaatcaatgtacaaaaatcacaagcattcttatacaccaataacagacaaacagagagccaaatcatgagtgaattctcattcataattgcttcaaagggaataaaatacctaggaatccaacttacaagggatgtgaaggacctcttcaaggagaactacaaaccactgctcaatgaaataagaggacacaaacaaatggaagaacattccatgttcatagatagtaagaatcaatatcgtgaaaatggccatactgcccaaggtaatttatagattcaatgccatccccatcaagctatcaatgactttcttcacagaatggaaaaaactactttaaagttcatatggaaccaaaaaagagcccacattgccaagacaatcctaagcaaaaagaacaaagctggaggcatcacgctacctgactgcaaactacactgcaaggatacagtaaccaaaacagcatggtactggtaccaaaacagagatatagaccagtggaacagaacagaaccctcagaaataataccacatatctacaaccatctgatctttgacaaacctcacaaaaacaagaaacggcggaaggattccctatttaataaatggtgctgggaaaactggctagccatatgtagaaagctgaaactggattccttccttacgccttatacaaaaattaattcaagatggattaaagacttaaatgttagacctaaaaccataaaaaccctagaagaaaagctaggaaataccattcaggccacaggcatgggcaaagacttcatgactaaaacaaaagcaatggcaacaaaagccaaaattgacaaatgggatctaattaaaataaagagcttctgcacagcaaaagaaactaccatcagagtgaacaggcaacctacagaatgggggaaaatttttacaatctacccatctgacaaagggctaatatccagaatttacaaagagcttaaatttacaagaaaaaaacaaccccatcaaaaaatgagtgaaggatatgaacagacacttctcaaaagaagacatttatgcagccaacatacacatgaaaaaaggctcatcatcactggccatcagagaaatgcaaatcaaaaccacaacaagataccatctcacaccagttagaatggcaatcattaaaaagtcaggacacaacaggtgctggagaggatgtggagaaataggaactcttttacagtgttggtgggagtgtaaagtagttcaaccactgtggaagacagtgtggcaattcctcaagtatctagaactagaaataccatttgacccagccatcccattactgggtatatacccaaaggattataaatcatgctgctataaagacacatgcacacatatgtttattgcagcactattcacaatagcaaagactcggaaccaacccaaacgtccaacaatgatagactggattaagtaaatgttgcacatatacaccatggaatactatgcagccataaaaaaggatgagttcatatcctttttagggacatggatgaagctggagaccatcattctgagcaaactatcacaa

SEQ ID NO: 362 - DNA, 58002 bp, Homo sapiens
aaaatcagctttcaattatgtcagaatgaagaggtcagcaatactcctccactaaaaaaaaaaaccatacaactggacaaaattgacaaaagcatccagggaactagaaatctactagagatgggcagcaagttgaaaagctcctagagattcaaggagaaacagcagaaggctaattctttcccccacctcccatcaagctcaatcagcaagaatcgtagttttccagtttggagttggccaaaaacccagtggctcttctgccagaggagaaatacttataaagttttaaatttcaatatttagggtcgagaagtggcatgaaattttgtgactttgcatatactaaaagtagcaaactcagaaatgaatagggaaaggccacagctttgttagcccaaggatgcagtcccagttggggtgagcagcaaaccaaccagagtgctaatggggagatcctggaagggttgagacaagttttccacatacccctggctgactgagaatacgaaaaaactaacccagaaaaaggaaaaaaaaggagaaacataagactaaaatcaagttgggacaaatagaaaataaatcacaaaatgatacacctcaactcaactttaacatgcattaaatattagtgtattaaacactccaaataaaaggcacaggtgtcaaaatggttttttgttttgttttttttttcttaaaattgttttgaagaaaagcaaaaccaagcatatgatttacaagagacacttttaaatataaaaacagtgataatgaaagtaaataggtggaaaatgatacaacaggaaaatatttagcataagaaaactagactggttctattactacagctggcaaaaaaaaaatttcaaagcaggcagtattaccaaagataaagtaggatatctcataaaaataataaatgaaaaccaaatagtcttatccatttatgcccctaataactgagcttcaaaattcacaaagcaaaactaacaaaaaaagaagtaaacaaatctccaaagttgaagacttaacaccttcttttcaatagcatagaacaattagacaagaaatcagtaaagtttagaagattttaacaaaactacatacctttgcttaacactaatcagaacactatacccaaccacagcagaatacatattcttttcaagtgtacatggaacatttatcaagataagccatattttgagccacaaaacatctttatatgtttcaaacaatggaaatcttataaaatatgttatctgaccacagaaacaactaacttagaaatcaggaacagatacatatttttagaaaatccccaaacatttggaagttaaacagtgtatctctaaataacctttggatcaaagaagaaataacatgtgaacgattgagaaaatacaacttcaaaatttgtaggatgtagcaaaagcagtgcttacagagaaatggtagctatatgcactcatgttagaaaagaggcttaaaaccagttatctaagttcccacttaaggaagatgcagaagaaaggcaaagtaaaaccaaagtaagtagtaggagagatgttttaagatacacaagagcagaaattaatgaaacagaaagcttaaaatgatagagaaaattgacaagaacaaaattttattctttgaagagactggtcaaaaaggagaaatcacaaattatcaacatcacgaacaagaggggtatcactatagtggaagagggaatgtcactatagatcttacaggcattaaaaggataataaaggaatttttgaaaactttatgacaataaatatgatagcttagatgaaatggaaaaagtccttgaagcagaatttaccaaaaaatatacaatgataaatagaaaatctatataaccttgtatctattaagtaaattgaatttgttatcaaaaacattcccataaagaaacatccaggcccagatggtttcagtggtgaattccatcaaacatttaaggaagagataatgccaatcttatacaaactctttcagaaaatatagaggaagcagtttgcatcacattttaagagaccagtataatcatatcatctgacagagataagaaaataaagttacaggtctatatcatgattacaattgcagcattggtggtatagtggtgagcatagctgctttcaatgattatgaatgcaaaagtcgttaatgaaatatgaccaaaacaaatcagaattccaaaaaagagagagacagagtattattctggacaaagcacatttattccaaagatgcagggttagtacagcattagaaatatcaatgtaattcaacatgttaatagaaaaaagataaaaagcatatgatcttaactgaaaaattaacacaattctacactcattcacgtttagaaattctcaaaaaactaggataaaaaggaacttcctcaacttgacaaaagcatctataaaggtgacagctagcatcatagctaatggtgaaatattgaatgtcccccacaaggatatctacccccaccacaatgctatttaatactgtattaatcgttccaactaatgcaataaggaaagaaaaaaagcataaagatcagaaaagaagaaaacagtctttctttgcagaaaacataattatttacattgaacatcctcagtaatactaaggaataactactagaactatttaataaagtcacagttatatctcatcaatataaatatatatacatacaaatatattttctatatactagcagcaaacaattagaacagcggtgtttttttttaaattgacttagtatccaaaaaacgtaaaacacttaagaataaacttaacaaaagacatggaaggcctctgcactaaaaactacaaaacactgctgagaaaaataaatgatctaaattgagagttatgccatgttcacatgttggaacactcaatgttgttttgtagtcagttctcctcaaatcgatctggcaattcaatgcaatcacaatcaatatactaacaggcattttaataacttttcaaagttgattctaaaatttatacggtaaagcaaagaatacaggaatagccaaaatggctgggcacagtggctcacacctgtaatcctagcactttgtaggggtggtgtgggggctgaggcaggaggatcacttgaggccaggagtttgataccaatctgggcgacaaagtgacaccccatctctacaaaaacattttttttgaaattatctgggcctcgtaatgcacacctagctactcaggaggctgaggcaggaggatcacttgagcccaggagtttgaggctgcagtgagtcatgatcacaccactgcactccagactgagtaacagagtgaaaaaatgtcagaaagaaggaaagaaagagagagggagagagagaaagaaagaaagaagggaaagaaaaggaaagaaggaaagaaagaaaagaaagaaggaaggaaggaagggccaaaataatcttgataaagggcaaagttgaaaggctcatgctacctacttcaagacttgctataaagcctcagtgatcaagacagtgtgatattggcataaggatagataaatagacatatattgcagaatagggaatccagacatcatctcatacatgtatggttaacatacgttttttttactaaagttgcagagctaaataatggggaaaagagagcctttacaacaaatagtgctggaataacagaataaatgaaagaaggaaaaatagatcttgacatctacaacacaccaaacacaaaaattaatttgagatgggtttcagaattaagttaaaaacttaacaaatatctagaaaaaaaaaaaacagaatgtctttatgacttatctacaggactccaaagacactggtcatttaaaaatgacttacagatgcctgcagctcattctggggaaaggtcattcattgttatgaccaatgtggatacaaagcctaacacaaaaaggtcttgaacttttggattaggttgttcttgtattgatcactgttctcaaaaggaaagcctcaacacaagctgtctacctatatcatccccttgtacaaagaagggaactgaaacataaagaagaaacaagtcgtccactagcattggtgacatcagcaaaattgtagaataggcagctccaaactcccgtccctctacagaaatactgaaaaacaagaagcaactgtcagagccaactttgctagaactctggaaaagagtcagaagtttacagcaattaagaaagtgctgaaccaagaaaaagcaacttaaaaatgataggacatttgccagttttttaaattggggggaaaatgataggaaaactttgtggcatttttacttgtccttgccacatcccctctttgtctcagcagcagtcttaaagacagcatcccgtgttcccagtatgggaccctgaaccctggttctggagggagcagagcaggcttcaattgcaaattactggagtttgtttgtctgttctaacctattcgggagctaactgaagaacttatatgaggtatgcatctcgttttgcctaactgagaacccgtgaagagggagaagtgacaatcattgctcagaaacattgtaaggtgaatacaaaacctgcagccacctgggggcaaaagattaaggttcagacatacaatagaatgtctgaggtctgggagcaaaagccaggaagagagttcctttgggaaattagggcaattcaaaactgccagtgtgtattcgggagtttagaaagcaacatgcatgccaggacaggacgcatgttcagaaaagacctgagaagaccctaaccactggctgatctctgggctcagtacaagtagaaagtaaaggctcatgggaatatatatatatatatgtgtatatatatatgtgtgtgtgtatatatatatatatatatattttttttttttttttttttgagacagagtctcgctctgtcacccaggctagagtacagtgatgtgatctcagctcactacaacctctgcctcttgggttcaaatgattctcctgcctcagcttcctgagtagctgggattacaggtgcctgccaccacacctggctaatttttgtatttttagtagagacaggattttgccatgctggccaggctggtctcaaactcctgacctcaggtgatccgcctcccttggcctcccaaaatgctgggattacaggtgtgagccaccatgcccggcctcatggggaattttaaatggcctaccaaagtgttaatagtgccccaagacagagccaatccacaaagactagaagaggagggggttttacttgttttgttttacttagctcctggcaatcaaggacagctctatcaaaaacactggctgaacacaagctaagccttcagcaatcaagacaagcaaaccgtaaggaactggaagaatctgacttccagagttaaaacactgtaatatttgaatgttcaatttttaaaaatcacaaggcatacaaagaaacaggaaaggataatgcattcaaaggaaaaaaaataaactgacaaaactgtccatgagaaagctcaaacattgaaattattaggcaaagactttaaaaacaactgtcttaaatgtattcaaaaaactaaaagaaatcatggaaacgaagaaaggaaaccaggaaaataatatatgaacaaaacgagaatatcaatacagagatagaaattataatgaggaatcaaatagaaattatgaaggtgagaagtatgataactgaaatgagaaatttcactagaggagttcaacagcaggtttgatcaggcagaagaatgatttaacaaacttgaagataggacaattgaaattatccattctgagaagcagaatgaaagagtgaagaaaagtgaacaaagactaagatacctgtggaacaccatcaagtggaccaacatatgcattatgagagtctcagaaggacaagggagagagagagacagaaattatatgtgaatggccaaaagtgtcccaaatgtgataaaagacatgagtctacatatccaggaagctcaacaaagcccaagcaaaataaacacgaagagatacaccaagatacagtataggcagattgtcagaagacaaagagaatcttgagaacagtgagagagaggcaactcatcctgtacaagggagccttaataagattaacagttgatttcgcatcagaaaccatggaggcctgaaaacaggaggcctgatgccacttcacacctactaggatggatataattttttttaatggaaaataacaaggagaggatgttggagaggacatgaagaaattgggacccttgtacattggtggtgggagtgtaaaacgatgccactgctgtggtaaagcttggtagttcctcaaaaagttaaatgtggaactaccacatgacccaatgtcttagtccatgcaggatactacaacaaaaataccataaactggatagtttataaacaacaaaaatttatttatcatagttatagagaccgagaagtccaaggtcaaggtgccagcagattcagtgactggtgaagggatctatgatcccttcctggatcatagatgacagtcttctcactataacttcaggtggaagaacgggcatcaatcatgagggctccaccttcatgacctaatctcctcccaaatgccccacctccaaaaccatcaccttgggggttaggatttcaacatatgaattttgagtggactcaaacacctagcagttccactactaggtatatatccaaaagaaatgaagcagaagctcaaacaaatatttatataccaatgtttatggcagcataattcatagtagcctaaagataaatggataaattaaagatgctatatgcatacaatggattattattcagccataaataggaatgatgttctgacccatgttacaacatgcatgaacattatgctcactgaaataagccagacacataaggacaaatattgtatgattccaattacataaaatacctagaatatgcaaattcatggagatagaaagtagattagaggttaccagggactcaaggaagataacaatggggagttgcttaatggatggagtttctatttgggatgatgaaggggttctggatatgaatagtggtgatggttgcaaaacattataattaatgctactgaattgtacacttaaaatgatttaaatggttaattttatattatatgtattttttaccagaataaaaaatgttggctgggtgtggtggttcatgcctgtaatcccagcactttgagaggccaaggtgggaagatcgcttgaattcaggagttcaagaccagcctgggcaacctagggaaacccgtctctaccagaaaaaaatagctgggcatggtgacatgtgcctgtaggcccagctactcagaaggctgaggcaggagaatcgcttcagcctggaaggttgaggctgcagtgagccatgattgcccccactgcactccagcctgggcaacagtacaagatcctatctcaaaaaaaaaaaaaaaaagtaaagactgataaattgtaccttataaaaataaaataaatacataaaatgtgactagcaattttaagacacttaaatatttgaattaatttattgaatacctgctctgggaattagtgttgtgtttccatttacagagacaaaacaggtctaattgattgactaaacaatagatgtaaatgtggtcagtgtttggatgtctattcatagaataggaacaatttttctgagaaatgatttgactctcagctgtttcctgtatgacctctcaatttacattttattcaagagtttctaatataatattgtggagcaaagaaacttgacagcaacagctgttgagagaaggtaactgtcatattaatatttctgggaagaggtattgcggtgttaccagattccagatttgcaccttttcccctcaatccctttatccctctcaaacattatagtgatttatgaaaatatatgtataattccaaataagttttagataattccatatataccaaatacccaattatctctttgctgtcaaagggtaatttatcctcatcatgacacttgccatcattacaagtttaaagcctaaaaatgaaaagaggtttcacacatttaagagctaactcatttaataataaatcaaaagtaagtatgagtttcatttagtagtagcatgagctagctgcagggaaggtcctctcaaggtggtcctttttcttctcttcaataaaggcagaactctattaaagcatattagtaaaaaccatatttaaaagaattactacactgaactgagcagccaccaaatgcaattggtaccaggtgatataagggcttctcctctcagggggcttataagcaactaaggcaggaagtcacagataccatattctgcagtgtaatttacaaatgaggtgaaaacaaagtgttccaaaattctaagagagacattggaattctgaccacaagtgtaatttatggagcctcagagtaattataggatctggaacagctggtgctcaaatttagtggtcctccagttgctggaatctgcgatttctgggaagttaaactttgtgtcactgcttctacttgtgataaaatgaaaccgctttcaaagagaagattcctattcctagcctttttgggtaacttctactacctccacttaaggatgaaaagggagaagtttcctccaagactgcctcatggggatcagagtgtcacctccatgctcctgccctaagtgcccctgagcacaccccagagggaggctaagagatttttgagaaagaccatgtgactggctgataaacacctattttcctcagattccacctgaatttatatcatcagtgcatcactcttttattttgttctctctgttcctctttttaaatattaatattctctggagaggggtaaaacattaaatgaattcacactgaggaaactggccaggtacaatggcttatgcctgtaatttcagcaatttgggaggccaaggcagacagattgcttgagccccagagtttgagaccagcttgggcaacataatgagacctcgtctctacaaaagaaaaacaaaaaaaaaaattagccaagcatggtggcacacacctgtagtctcaggtatttgggatgctgaggtgggaggattgctttagcccaggaggttgaggctgcagtgagccatgaccatgccactgcactccagcctgggtgacacagcaaaacactgtctcaaaaaaaaaaaagaaactcttcaggctgatcagatctgcttttctctgatgagtttcttaggagctctacatttctggttgctgcaataggcaaagtatagaatggaggtcaaggcctcaaatttctctgacttcccagctgggcttgagagtgactctggccctcaactgagggcattagtaagctgtccttaagaacgagagtgtattttctggctgtattcttaactcatttcactatagagccatgtctgatattaacagtgcagtgctagactagagaggcctggcactcctacagccttctcctgtcttctagctgggacttcacaccacagacccaaaggaaaagagacccaaagatccctgcagaaacctgagaatatttcctttacctcagtggtttcataatctgttcttagtttcctgtttctgctgtaaataattcactatatttttaagagagagaaggtcaggcccttgtgagccagaagggatttgagagatgatgaaagctacgtatgttacccataacctaaggacttctggcaaggtggcctacctgagctggagtcatgccttttttccctggacttggagatacctgtcagtgcagaaaggcctacttttgatcttggaaataagtttcctggggtgagttcttaaccctttccagctttcccaccctctttggctttagccatggccttctgatctgtgtttctcaggggacctgcaggccccagatatagccccatgctgtcctcctaccccagagcacactgttcaggctacttccactggtactgaaatccagtatttcacttactctttttctttccaatatcctcatgacattcaatatttcacttactctaggtcctccctgcctaaggcccaagtcaactttctgtccagtgggatttgtaatccaatacctcctagccctagcagaatcccatgtggataatcagaaatgtgactggaaaaaggacagagctctatggctgtgggtcccagtccccactgctggcagtaagtccccagcagtgagctgtgtaagcaccttacattctgcgcttggttgaaaacagcaaggcaagcatccacttgagaaatgtcaacccctaggaaatcccagcctcaagtctttctcatcccttgggaagtgcaaattggatagagaagaaaccaattaaaaacaaaacaaacaaatcatacttagatattctggcttttctcaccagggctggattaaagcatgtacttcaaaataataacaacttaagtcaataaataaatgtaaggaagtccaaatgttcacctgaagacaactgtggtcattttttggcaatcccaggttctcttttctacctgtttgctcaatcgtggtctccctctccctctcttgttggggcccatgcccctgctttactgttgccagaggcttgtacttgtttgccttttaggtaggagcagttacttccactcccctcacctgccataaagcatctttataaacaaagcaagtagaagaaacacatcctggtatccaccacattcggcttttgttgattctgttcacttgggagcacctgctgctagggaataagaaggttgaggctgaagagtgaggactcttcagctcccctctggcaggacccgggagaggaaagagccctcagctggtccatcctccccactcctggtcagccttctgttctgagatcaaagtggtggggtcacattctcgagaactgtgctcagccccctcatctcacaccctttccctctccctgtgtgcctgcccccctcttacataaccatgctggtgattggcaccgtcataaatcaatactttgctcactttcacatcaagtaacactatccagggaggtggtttcaacaaaggaggaagtataaggagatctaggttcaaattaatgttgcccctagtggtaaaggacagagaccctcagactgatgaaatgcactcagaattacttagacaaagcggatatttgccactctcttccccttttcctgtgtttttgtagtgaagagacctgaaagaaaaaagtagggagaacataatgagaacaaatacggtaatctcttcatttgctagttcaagtgctggacttgggacttaggaggggcaatggagccgcttagtgcctacatctgacttggactgaaatataggtgagagacaagattgtctcatatccggggaaatcataacctatgactaggacgggaagaggaagcactgcctttacttcagtgggaatctcggcctcagcctgcaagccaagtgttcacagtgagaaaagcaagagaataagctaatactcctgtcctgaacaaggcagcggctccttggtaaagctactccttgatcgatcctttgcaccggattgttcaaagtggaccccaggggagaagtcggagcaaagaacttaccaccaagcaggtatggtttttctttctttctcttttgctgggggctgaccgcccttcagctccagccaaaagatgtgtgtgaacacaaatataccttctgtttgaggtcagcatcatagtgggtcgtgaatcatgttggccttgctgctgtctcctcatttctagggtggaaaaaaaaaagcatgaaaacaatcacttaatgttgagccccattactgatgctctctggtcctgcactagcctcctagaaaaatcaccacaggagaagccttaactactgcatgagttaccacaagtcacacatacaaccagctccctgttacagggctggagtccctggacccaggaaataccacctccaaggactgtgggagctggggactatgggaactgggatcaactcagtcctgattccttttggcctgctgggttagtgctggcagccccctgaggccaaggacagcagcatgacagtcaccaggactcaccacttcaaggaggggtccctcagagcacctgccatacccctgcacagtgctgcggctgagttggcttcaaaccagtgagttttctacctctactattgaaagggcaccttgtcccacagaaccgagtcttgcctgcatgtggtcagtgccaccaggtccttcttctctccactttacagcccagctcggctgaagctatggccagaggcactgctttaaggccactccatatctaggacaggtcaacagacacctctgaggccactgagtcttgactcaatgaatcagctatagcaggcactattcctctcccacatggcctctaatgatatggtcagagttgaaaggatgctaagggaggcctcagaggcttatttaatcagttggttaatgggaaaaagtattttgtggtacacaaatacgctttaaaaatattttagttatgtcataaaagtctaaacctggggttgacaaactatggctcacaggctaactctggcccaccagctgtttttataaatgaagctttattggaacacagccatgcccattcgttatgtattgtatatggctgtttttgccctacaacatcctttcaactctggccatatcattagaggccatgtgggagaggaatagtgcctgctatagctgattcattgagtcagcaaaattgaccaattgcgaaagagacagtatggcccacaaagcctaaaatattaactatctggcctttaacagaaaaagtttgccaactcctgatctaaaagctgtcaacttgttccaaaattattatggaataaacccaagacaaccacaaaactgactagactaggttttttaggtaataactttttaaattataaagtaatacatgatttcatgctccttgaaaatgagaaagcagtatagataaacctaaattcacctttggccattctgtcaatcctaatctccagtttccccaaaagtacttagtgtgatatatttactgccagaccattgtgtctgtgtgtgtgttcatctatgcatagatggactattaaacctatctgttgccatgttgttctaattctgtttttccactcaatagcaagacttggagactttccatatctgtatagagctctacttcatttattttaactgctacgtcatatttcacagtgtacacttcttttatttagccgttttcttttcgatagatatttaagcttttccaatttttcagtcttaccaatgaacctcactgtgtttgtctgcttctagacatgtgcacgtattgcactagaggaactactaagacgttgaattgccacatcacaggatatatgtggttcaatttttggctgccaaacagccctccacagtacccgaaccgactgtactcccaccagcagagaaggatagttactgttcctccacactccaaacaatgcttgctgtttattcagtattttattattttttccattgaattagtgcaaatgacaacccattatttcaatattttaatttccctgattattaatgaagttgagcattctttttataggacccctcttggccattgtatttctcttcttaaattacctattcatatccttagcttattttatgtcggattttttttcttctttgtaggagttttttatttattctcaatgcaaattatttgatatgtgtgtaatattctctctaagctttgtttaaatcatactttttagccaacagaaatttttactattattgttgttgttattttgatgtagttgaatctgttagtttccctctttctggattttactctttgaggctgatttttaaaagatttctcaacttccaaaattatgaagctactttggtgcaccttcctgtaatacttttatttaaaaagttagtctttattcacctggcacttattgcaatacattatttcaatactatttattgaaaagtccatctttttcctatttgtttgaaatatcacctctatcatgtactaaattcccacttacacatgtccatttctgtgtccttttgtatttatttcctattcctgagccaatttccactataatgtttaccttttctacttgattttttcccccaataaatagaaaatctattttgtgttttgatattttgcctagttaccttatggaattctcttaatagttataaaagcttatcagttgattcctttggaatttctagttagacaaacatatcatctatatatagtaagagttttgctccttcctttccaatctttacaaaccttaattttttgtgtcttattggtttttctttgccattcagcataatgctgagtagtagccatgaaagtagatagtctcagaagtgatgcatacagttgtgtgggttctatactgcacaattctaggagatactctttacaaacacttagatgtcctaggaattcttgtcatgttcctgatttccatttttattttgtactatgaactcatttggaaacttctctttgggacttgttgagattgaaattgttttcctctagaggatttatttttgcttttgccaggaacctgaggacagaactaactgggaccaccataagcttggggtctactggccacacaaatagtgagaatcctgacccaaacttacttgattgcaggcctgttgttaagaatttcaaaggagacttttctttttgctctacccagagccaaggctgagaaggcctgggatagacctgtctccctccatggtttctactgaggatgtcacccttaggggatcttgagtttatagtctatgatctggttaggctccaggctttgtctcctattctaccattaaaatccaggccccaggcctacaggagtccagaaaactccaggatgatcatgacttccctttctcatgcctctggcttagcataatcttataaattttggcctcttgagacttcctttactttcctaccagctcaatcctgcatgaaaaatgacattcttaaaaatttagtatttctaggtgctgcataccaggaggattttctgtaaccaacttctccatcatagtgccagcaataaaatctttattttttattttaatgagattgattctaatgcttctccaataagatagctagtaaaagtgtttagtaactattccatatcaagttagtgaagctctcttctattcctcttggttaaccaagaattttaaatcatgaatgaatattgagttttattaaatgctgttaagcattgattaatttccttatcatatctccatagttaattatatagctcatcccaagggtgatagaagcagagatgatccaatagccactaggacccttggaatgcagacccatgatttttccattaaaaagaacaataaattcagggaacgtggacaacattaattcaaattcttagtgtggttgccacgttctgtttgttgagccatcagactcttgccctcacacttcagatattggtgtcctgggcacaacctggggaggacaggaggaatgtgtagggaacctctcttgcatacaggggctttttaggtggcacaatttgaagggggctgggaaaagttccctgcaacacctcctgaacctctttgaaacatcgatataacaaactgaatatccaactggaaattgacataaagagacatatccaaatccctcatgtaatgtttgaaataattttcctggatctgtgtaagttccaaagagtcaaactataaaaccacaggcaacactggcactacacatgcattgataagacataggcagttaactcagaggccactgtgtcctgttaaatattggaagagggtactgtgtgtacttatgacctgggctggtgccagctctcaaccctgatctgtgtctagtaaccttctgacctcttggatctgatgaccaagtcccaggaagcataaaggccaattttcatttatggccccctgaagagagcagctgacttctctttcttgaattcataaaccgtgactttggctatctgagtttcctctggaggcctgccccatgccagggccagtgaggaggttttgttaataatacttgatttgtttcataaagaatttaaaacatatagcctcattttgcccccatgaattctgtgaaaaaacaacttgcatcatgtatctatttacatgacaggaagaatcagaataagggaaaagaaaagatgttctggccaggcatggtggatcatgcctgtaatcccagcaccttgggaggccgaggcaggtggatcacttgaggtcaggagtttaagaccagcctggccaaaatggcgaaaacccgtctctactaaaaatacaaaaataatccaggtgtggtggcacacacctgtaattccagctacttgggaggctgaggcacgagaatcatttgaacccagaaggtggaggttgcagtgagcagagatcataccatggcacttcaacctaggggacagagtgagactgcctccaaaaaaaaaaaaaaagttccgtcattaattgacttcatgaactggaacacaccccagagccccagtttcctcatttgcaaaagggataataagaactgccctgcccccgactcccttattcaacttgggataagccctgccctgccttcctcacaggcaccttgacatgaagttgtaattttgaaatcattttgtaaacagcaaaacttgtgcaaatgtgagttaaattcaccaaacgtctcccttcactgaacaacgtcaatggttttataggcatcacttgcctgcatcttagaaattcagtattcttatattacattccccttacttgcttttttctctttatcctctggccagttctgctattaatatgtgtgtgtgtgtgtgtgtgtgtgtgtgtgtgtgtgtgtgtgtgtgtgtggtgtgtatgtgtatcttggagatagtaggatgattatatatatatttaattatgcgtgtgtgtatatatatgtgtgtatacacacataattaaatatatgtaatcgtgtgtatgtatatgtatgtatacacacacacataattaaatataatcctgctatctccaagagtttctatcccaaagattatgatttttgtttttttatccatttacccccttttacttagactctgttgcttcaaattcaagttgcccactcttctcttcccataatctcagtgacctggttccaaagcttgtgctttgactcatttgaagactaaatttatctgtatgtcctccccacatccttttcctgggaaggaactatctcaccctcaaagtacattgactttttaaaaaattattattattattactttaagagacagggtcttgctgtgtcacctaggctggagagcagtggtatgatcatggctcactgcagtctcgaactcctgggctcaagtgatcctcccgcctcagccccccagagagctgggactacaggtgtgtgccaccatgcccagacacttttaaaatttatttttggtagagacaaagtctcatgttgttgcccaggttcatctgaaattcctggcctcaagtgatcctcctgcctcagcccccctaagcattgggattacaggtgtgagccaccatccctggccatcattatacaaatttatttatttattttcatttgattgagacaaggtgtcattctcttgcccaggctgcagtgcagtgggacaatcatggctcactgtagccttgacctcctgggctcaagtgttcttcctgcctcagcctcccaagtagctgggactacaggcacatgtcaccacacttggctaattttttatttttttgtagagatggcatctcactgtattgcccagacttgtctcgaactcctggcctcaaatgatcctcctgtttcagcttccctaagtgctgggattacaggtgtgaggcactgtgcccggcctgtatattgactttaaacaacaatttataatgtgagtcatttcacatatctctttgattatttattttatttcctagcaccataaagttgtttttattgacaagatcatcttctccatgccagtctgtttgtgtactgccaattttctgtctggttagttggatttccctgctactactgcaagtgtggactgcagacccatagcatcagctcacctgggagcttgtgagatgctgaagctcagacccaccacagacctactgaatgggaatttgcattttcataagctcctgggtgatctgtatgtacttgaaagctggagcatcactctcttagattgtaagcacaggctccaggttaccttaaacgggggcacttctgaagcaggcatgggagagaaggaaggcaaaaatctcaattgccagggccctgacctcctagagattaaaatgtagttcagaactcaggttgggatcaaatgcactttaattgacatggttatctttttcttcctgattgtagtgcttttaactactgtattagtccatgttcacattgctgataaagacatacctgagactgggtaaattacaaagaaaaaaaggttcaatggactcacagttccatgtggctggggaggcctcacaaacatggtggaaggcaaacggcatgtcttacatggtgtcaggcaagagagagaatgagaaccaagcgaaaggggtttccccttataaaaccatcagatctcatgagacttattcactgccatgagaacagtattgggggaaccgcccccatgattcaattaccttccaccaggtccctcccacatatgtagcattatgcaagctacaattccagatgagattttggtggggacacagccaaaccatatcaactattgatgttactttcctttgtttcctttctttctgctgcttctcctcctcacaacttctgtttcctcggggcccttcctgcttcacagcttccctgtcctgccttctctctgagtgcactgtggctgccatgcacagggcaggactgaggcaccccaaccagtctactattttggcttccttttcaatttaaattcaatttaaatattatttaaatatttgatcaacatttatttggtgatgttctttttttaatttgtaaaatatacagaaggagcaggattgaaaaattaattagttctggtaaaattcaaataacaaattttaccatcttaagcatttctaagtgtatagctcaataatgtgaagtatgttttcatcgttgtgcagccaatctccagaggtttttcatcttttaagatggaaactctacccattaaacaactcccattcccctcaccccacagcccctggcaaccaccattctactttctgcttccatgagcttgactactatacctcatatttgtctttctgtgactggcttatttcacttagcataatgtcctcaaggttcatccgtattgtagcatgtgttagaatttccttttttttaaggctgactcatattctattgtagtatgtcccatgttttgtttatccattcatcagttgatgaaatttgggttgcttctacattttgtctattgcgaatagtgctgctgtgaacatcagtgtacaaatatctcttcaagaccccgatttcagttctttttggatatacatccagaaatggttgctgaattatatgataattctatttcaattttctgagaaattgccatattgttatctataatggctacaccatttttacattcctaccacctgagtccaaggttcccatttgtctacagccttgccaacacttgttattttctgtttatgtgatagcggccatcctgaatataaagtgatgtttcattatggtttccctttgcatttgccttatgattaacgatgttgagtactttttcatgtgcttgttggcaagtgatgttcttttaaatgtgtactatgttctttatggtcaaaataaataatttattctgtgtaattttccaaaccacacaacttcttggaaggcatgtttaagtgttcacataataaaacagtacatttcttccttgcaaacagccctacaccacatatttttccatttctggctctgtctgccaacttcaatgggctgtcctcagggttgggttggctggagtggccctgtgtgacaggcatgtgagtgtccctgagcaccgtacagatactagtctgcattgtcaaggagtgttttaagtctccacctcagggtgatgactgctttggtaggaaaggaggcaatctaaaattcacctgatttctgattcattccaataatgttttggtgtctttgaatatggcagccccctgggcagcagtccagccagcagaccttataacttagctctgtctgtatgtctgacatccagactcactagaagaggatctaaatgggccagggaattacttgtccctgggacagagcaattacaccatccctcataggccccagaaggcctatggacctttgcttgggcaccaggagcttctctgagagcaggtttggggtgggcttggcctccagagtggcctcctcctgcaatgtcaggctagattaacatctatgagagtctcctgtacaaggagaggtgggaggctgtgaacactcctatgtaacaccatttgtccccttgtgtgattgcttcaccaatgttgacagctcatgtgacacacctgtcttcttctgatggaggaaggaagtaataccattttctatcaaaagcattctttgatcatccctgtcctaaaaaaaagttacttgatgggtctcttgtcaaaatcagtgatatggtttggatgttttatcccttccaaatctcatgttgaaatatgacctctaggccgggctcagtggctcacaactgtaatcccagcactttgggaggctgaggcgggcggatcacttgaggtcaggagtttgagaccagcctggccaacatggtgaaaccccatctctactaaaaatacaaaaattagatgtggagttcagagtggaaacaggtgtgagagggttcaacagaagaaaacatagctgccaagtgtttgagtccatcggcaagtttggactggccttagctgttgcagaaggcatggtgaactctgccttatataacatggatgctgggcacagaactgtcatctttgaccgattctgtggagtacaggacattgtggtagggtaagggactcactttctcataccatgggtacagaaaccaattatctttgaccaccgttctcaaccacataatgtgccagtcatcactggtagcaaagatttacagaatgtcaatatcattccgtgcatcctctttgggcctgtcactagccagcttcctcgcatcttcaccaggatcggagaagactatgatgagcgtgtgctgccatccatcactactgagatcctcaagtcagtggtggctcgctttgatgctggagaactaatcacccagagagaactggtctccaggcaggtgagcgacgaccttatggagcgagcagccacctttgggctcatcctggatgatgtgtctttgacacatctgaccttcaggaaggagttcacagaagcagtggaagccaaacaggtggctcagcaggatgcagagagggccagaactcactggccactgcaggggacggcctgatggagctgtgcaagctggaagctgcagaggacatcacgtaccagctctctcgctcttggaacatcaccaatctgccggcagggcagtccgtgctcctccagctgccccagtgagggcccaccctgcctgcacctccatgggccaactaggccacagccccagtgattcttaacactgccttccttctgcctccactccagaaatcactgtgaaatttcatgattggcttaaagtgaaggaaatacagataaaatcacttcagatctcaaaaaagaaaaaaaaaatttagctggacgtggtggcatgtacctgtaatcccagctactcgggaagctgaggtaggagaatcacttgaacccaggaggcagaggatatagtgagctgagatcgcgccactgccctccagagtgggtgacagaggaagactccgtctcaaaaacaaaaaacaaacaaaaaaaaagaaacgtggcctccaatgttggaggtaggcctagtgggaggtgtttggtcatgggggtggatccctcatgactggtttggtaccctcggtaatgagtgattctcactcttagttcatagaagagctggttgtttaaagagcccggcacctcctctctctcttgctccctcttgctgtgtgacatgccggctcgcacttcaccttccaccatgcttggaagcttcctgagacctcaccagaagcagatgctggtgccaagcttgtacagccttcagaagcacgagccaaacaaacctcttttcttcataaattacccagcctcagattcctttgtagcaatacaaaatggactaacacaatcagatctcactgtaactctggaaacttgctgcccacccattctcttctagccaaagtccactttttcccctccagagttaccacaaggaaaatgaacagcctcaatccttaccactcaggcaagattaaagagttacagtgcagcagagaggcaggacaggaccaccgtgggccaagcgatcccaactctgcccaatcagtggaggctgccttctggaggctgtaggggaggatcagtttcctcacctcttccagcttctagatgccgtggcaatccttggctcacagccccttcttccatcttcaaagccagcaacttagcatctgaccctttttccacattacgtctctttctctgatcaaacccaggaaagcttttctaattttaagattcatgtgattagactaggcctgcctggataattcagcacactccccatctccaggttctgtaccctcatcacatctgcagagacccttttgccatataaggaaacatattcacatgttctggggataagggtgcagacatctttgagggcctttattctatctaccataaggacacgatcaaaaacattatagaggcatgccaggcaattaattaatgaaagtgttatgacatttttctgaattctgtgatgttgttacttgtcctttttaatgtctgtcatttgttgtgatttcttttctcattctttcttacaaatattctcttcggtacataattttgtatttgtaattgcgtgttttttaaaattattttttagacagggtctcactctgtcacccaggctggaatgcagtggcacaatcctagctcaccacagccttgaattcctgggctcaggcaatcctcccacctcagcctcccaagtagctaggactacaggcatgcaccaacatgcctggctgagtttttttgtttgtttgtttttttggggtgtttttttttgagatagagtctcactctgttgcccagactggagttgtgtgaacatggctcactgcagcctcgacctcctgggctcacgtaatcttttcatctcagcctcctgagtagctgggaccacaggtacgtgccaccacacttggctaatttttaaatttttttgtagagacaggatctcaccatgtcacccaggcatgtctcgaactcctgggctcaagtgatcctcccactttggcctcccaaagtgctgagattataggtgtgagccactcacccagcctttttttttttttttttaagagatagggtcttgctatattgtccaggctggtctcatactcctcacaattgatccttccacctcagcctcccaaagtgctgacattagaggcatgagcccccacacctggcctatattcttttttcttaaataggactgcccaggccaagcgccatggttcatgcctgtaatcccagcattttggttggccaaggcagatggatcacctgaggtcaggagttcaagattagcctggccaacatggtgaaaaacctgtctctactgaaaatacaaaattaatctggtgtagtggcccatgccttgcggtcccagctacttgggaggctgagccaggagaattgcttgaacccaggaggcacaggttgcagtgtgccaagatcgtgcctttgcactccagcctgagtgacaagattgaaactctgtctcaaaataagtaaattaaattaaataatgtaaaataaaataaaataggactgcccaaattgtgtaagcctcagaacccacgtaagctgactaaagggcacctctacttgcccattgactaacctgaacaccagatgaaattgctcttccaaacaccactagctggggagttggctcttggctggggttggtcagtgcacaggccagtaagggagctgggcaagtgcagaagtggagactagctgtgtcccagacagcgactctccggctgtgaccctggagagtcctttagcagggcaaagtgcaacataggcagaccttaagggatgactcagtaacagataagctttgtgtgcctgcagggggatgggaagagggtggggcaggagagggacataaaagggctctgaggcattgtactgtgaattccttcagtctcctgctctgctcagccagtcagccctgcctcccttgtttaggaccacacagcactgctgggtgtctgcctttccttgtgactcttctctagcctctgcatggccagcagccctcttcttttctcctattctcttaagaaacatgcccatcacctgcagtttctctgggctccccgttaatctgccttcctcatctcctaatgctgcctcctccctcccattgccggtgcctggaaatagtcaaggctgggttctgttcttttgcttgaatttctttcacttggcttcttgactctttctaaactacaatccccccattctcactgccttagttttccctctctctgtgtttctcaaactatatcccaccacgccctgacaagggcttctctcctgtagatcatcccttttctagtattttgctagaaatatatagtgggattttctcctttgccctacatcatcactaaacttcccaacctaataggcagtgtcttgcaccttctactgatcatttcattctttcttgcactaaagatgaccacttcccatgtctgtacccaattcctgtttggcccaaatgtatctgcagcactcacccgtgttctcacactgagtctctaaatatttgactccaaaggtcactagtggatcacctccctgcctctcactttcccccaaggcacaaagtcttctcccagcacttctctttagtcctcctcttcctcatgtttcttctgtagggggaggaccatgttcaactttgtgatttttttctagtttgtagttgtgatctaccctgtaccactgagtcatctcaaatcacttaaacactcacaccaagtgtaccgcacttcacggcttaatcccctgttgatcagaaaaccccaggtccctggaattgaagcagggtctcattcagcctgacatgacctgaaatttctccctgactcctttcccagccccaagacaggggacttgcaagagtcccattgttgagcctccttggaacccactgtcttccattggtcatgttccacccagcaggttctatctagttctaatcctcaatgctgcttcgcatcccttccttgctccattgtccagccctgagctcactcaagccttgtactgctctccccttttcccttccctcccaaccctattcctctcctctctacatactcctgggagccttgctccttctgtagcagaaacttcacacacattttctttcaaattctcctccattgctatctccagttgcaccgctcttcttcatttctttccctccacattcaaacttgtcttctctggagggcatgctctcctgggggctccccctggcccagcctcagcatggcatctgcctttctggttccttcccaccttctctctcctcacttcttgccctgccagatctgtctatggcaacagcccctgcagcagtgcactctcctcttcctcttcatgcccaaagccatgtcagcctctctcagcagcttccattttattgtagagacactaagcatagagaagttagtgagtaaagtgagttagttcaacatcagtggcaagggctaggacatggcctcctgactatgacaacaagacaatgcccactatatctccagccgccaggagcaaaaaacaaagtcctctgacctccaggaggctgccggctagctgggtcctgtttggtcacaatcagtcattcccatgtttatgtgtgtgtcattcatggaagacctcccttctccctttaataggggatttggggcctcttagcaaatgaagtaactgcacaaagatatgtgtgtgtgtgtgtgtgtgtgtgtgtgtgtccccttctcattcttatgaagtcctaatgctcctccattacccccaaacaaacacaggggatcttatactgaaaatcagcattcacagaaaggaaatggcctcatgaggaagcagcaggaacaatctgtttatgggagagctcagtgggccaggcaggaggtgtcatggcccttcctctgcgtctaccatacctccttcttcaagctgtttaggtggtgctctggggtgtcagcctccaggcattcagctatcggactcttactctaaagaggaaagggaaaactgaggaaatacagacaattatagaggagaaaatgaaaataattccaaccccaaattcatcactatttcaattctatatatatacatatctacacacacagatacatacatacatatctctaaaagatagcatatacaggacattattattattgtagttttaaaccttcaatattgttttatatgcacccacatatttaccctttttagttctccatattccctcctgaagttccatgctccccactggcttttgccaggataactttctttggtattacttgtaatgcaagtatctgctggcaacaaattcttcagtctttgtctgaaaatgtctttattttgcctttacaatagaaggataattaaactattggtcaaattcttggatagcaataaagatattaaccattgtcttttctgttttacaatttcaactgaaaagtcaaccattaatcttaattttatttctttgtggttaattttttttttctgggtatttgtaagattagttttcttgtcatcgattcccagcaattttacgatgtgtgggtaggtatgtgtgtttttaatcctttcattggtttcaaaaacttcttggcaagtgtgctttcccagattgcttctgtccgattcttgtgtccgtaacatatgttaggctatttcactgagtctcgtgtgtctcttacgccctgttcttttcttaatgctcttttttgtttgtttctgtgcttcggtttatatattttctgttgacctaattttgaactcactatcactgtctgttgctgattcaatctgttgttaaaacatccaatgagttgtcagtttcagatattgtactattaatttctggaatgtccagaaatgtccagttgattatttttaaaaatagcattattgagagataccttatgtatcataaagtctaatcatttaagtgaacaattgaataactgttagtatatttagagttgtgcagctatcatcaaaatctaattccaggacatttctatgctccaaaaagtactcgggaggctgaggcaggagaatggcgtgaacccggggggcggagcttgcagtgagccaagatcgcgccactgcactccagcctgggcgacaaagagagactccgtctcaaaaaaaaaaaaaaagaaaaagaaagaaagaaaaagaaacctcatgttcatttgcagccactctctattccactctcagccacaggcaaccacgaatctactttctctatggatttgcctttcctggacatttaatataagcggaactatacaaaatgcggtctttgggtatacttctttcacttagaatgttttcaaggttcatctgtgctgtagcatctatccttcattcttttaaaccgctgaatagaatttcattgtatattagtattccaggtgcattccacattttattgatccacgaaccggttgatgaatatgtgggtcgggttttgggctattatgaataatgctgctatgaacatttgtgtgcagtttttgtgtgtgggcataggttttcatttctcttgggtggatatgtagaagtggaattgctgagttatggtgaatgtgtttaacattttaggtaactgagcaattgttttcttaagtggctgcaccattttacactcctgctagcagtgcataagggctcagtttctccacattattgccgattcttacctctttttgatttgtagccattcttgtgtattgtaagatgtatttctttgtggtttcaatttgccttgctctaataatcaatattcttgagtatattttcacatgtttattggtcattcatagcttctttggtgaaatatctattttaatcttttgttcatttttaaattgggttatttgtatttatattattgagttgtaagagttcttcatatattctggatacaagtcccttatgggatatgtgatttttaaaatattttctgtctgtgtcttatctttctactttcttaatagtgtagaaagcacaaacattttcaatttcaatgaagttcaatttatcaacttttttgtgccatattttttctgattaaaaaacaaacaaacacaaacaaaaaaaaacttttaaaagacaggaatagaataagtcttccgaatgtaatatgacaatctgtcttaccaaccaccagtaatatgctttataaggaaaactaggctgggtgtggtggttcatgcctctaattccagcattttgggaggctgaggggcatggatcacctaaggtcaggaatttgagaccagcctggccaacatggtgaaaccccgtctctactaaaaatacaaaaattagctgggcgtggtggcaggcacctgtaatcccagctactcaggaggctgaggcaggagaatcgcttgaacctgggaggcagaggttgtgcaccactgcactccagcctgcgtgatgagactttgtctcaaaaaacaaacaaacaaacaaacaaacacacacacacacacacacacacaaagacatataatacccgaagccttcacgcttttggtgtcacatctaagaaatctttccctaaccataagaacttattcctgttttcttctcagagttttatagttatagctcttacatttaggtctatgattttgtgatccattttgagtaaatttttgtgtatggcacgagataagagctttaattcatcttgcatgtgaatatccaattttccaagcacctttttttagcaaagctggcctttcctccattgaattgccttgcatttttaccagagatcaattaatgataatagtaagggtttatttcttgaatctcaattatgacccatcaatctctatatctgtctttatactaatgccacattatcttggttattttagctttgttgtaagttttgaaatcaaaaagtgtaagtcctccaactttgttattctcttccaacattattttggctattatgggtcttttacttttccatagatcacagttctcctttgaagcttttcttgccttcatccctttgtctatattatcttccatttatttttcattaatcatagggtgttttttggtcgtttttttcccctttttgtggagaatgcggtcttgctgtattacccaggcaggtcttgaactcctgggctcaagcccttcagagcgtataggacaagatgcctctggatgtggtcagagtggcagtaaggttcctcggtccattcttctatagctggaattgaaatggcaagaaaaggagtgagggtcttagggaatcacttcctgcctgggaacagagagctacattaaaggagtcccatggcatggagggaccctgtctggggtgaaccacctaggaaaaagtttgcaggcaatcatggaaatgaagaaagtttaataaacggtttacccactcaaagacaaaccttgtgaaggatgcagcatagcactgaattaagaacacaggttttggagtcagactgacatgggttgagattctggctccacctcctcccagctaaataatgtcaatgaatcactcacctgaagaggagaggggctgtgtgtgctcagtgcagcctgacagtgccttcagcaaactgacaattttagtcacgtagaaagactaaattcattgatttattcactcatttattaaataaatgaattatattcttcctttctgagaacgtagtccttagctttaatacttaccctgcataccggattttacaattaattatctttgcaaagccctctctgaagaagtgtttactttcactcagtacaggagatgatcctttcaaccttcttctgatgagatttcaccgattactaagcaccgtgagaagcaggtggagccctcagaagcaaacacagttgtattcagttaaaagtacacatctaattggtctccctaaatttgcatgaaagagagatgtagctggcacacctcagacacccagtcactgtcattttcctgcccagagggcaacattctgtaaaggaacagtgatggaagagtggcatgggagcaggactgcagctgctgggctggctcccccatcaccacagttcagatctatttctaacccaactccaggggttccacttccattatttcttgccgtgtaacaaatctcccctaaactcactggattaaacccaccactgtttcattttctgacatgattttctgtgttggctgggctcagctggggagttcttctgcatcacaggaccttggccaaggctgcagtcacctggaggcataattgggctggggagtccaagagggctcactcacacatctgctgtttggtgagggcggccgggaggctggggtggctggtcctgtctcatcggtgcgatctcaggcctctccctcttcacatggcctctccgcatggtctctttgggtggtcactgagcagggtagccagactttgttgcatggtggcttagggctctccaaagacaaaagcagaagctaccaggcttcttatagcgtagacccagaattgtctcttccccacattctattaactaagcaagtcacagaccatcctagactcattatgggagggggctgcacaagggtgtgaatctttcggggcatggctcctgggggccaccttggataacagctgtaatgggttctctagcgggggcttcataagcatatgagagaaggaactatagaatgtgccagagtcggcttgcttaacacttgggcaaaacaaaatgaaagttatacaaatactgcggaatgagattctagcattaattctactatctcctcattaagaaattggggaaagtgtaaattagacatgatttaagtaaatgtcttttttctggtcctttggtgatatttcttttatcttcttggtccatgtcacctgtgggcttctcctgtgattcatgtagtcatgttgtacttgtcacttccattatggggaagagcatttatatttattgcgagaaagcagcatctcaccatcttcaattgtccaaagttcacaattgatgtgcagaatctttgccaactgtctccattgccccaggtgctgctatccctcatggctcctgaatgatgctgaaaatgtaagggaggttggtctcttctaatgtacactctgaaatactatcctgctaataacattttctctgcctgcctgtgatgctctttgattttggaacactctttgtgtctgtgaacagttagagggttatgtaaagtccctgggtttttgtcataagagtgacttccaagttatttggaatacataacagaatatatctggtgtgtagtagatgctcaacacatgtctgttgagcaatatgataaatgctatgatgattgttatgaggaataaatgagtgccatgttctgaatgtttatgtttcccccaaattcgtatgttaaaatcctcatccccagtgtgatggctttagaagatggggactttggggggtgattgggtcatgagggtagaaccctcatgattgagttagtgtcctcatgaatgagaccccagaggccgggtgtggtggctcatgcctgtaatcccagcactttgggagtctgaggcaggtgatcacttgagcccagaagttgcagacaagcctgggcaatatggggaaaccctgcctctactaaaaatgaaaaaaaaaaagtagctgggtatggtggcatgcacctgtagtcccaggaggctgagttggaggatcgcttgagtccaggagatagaggctgcaatgagctgagatcacaccactgaactccagcctgggtggcagagttttttcttttctttcttttttttttctgtctcaaaagagagagagagagagagagagagatagagaggtcccagagacccaaagagctagctggctagcccctttcactatatgaggacagagggagaaagtgccatagatgacaggaagcaggctcttaccagacattgaatctaccagtgccttaatcttggacttctcagcctccagaaccatgagagataaatttctgttgtttataagccactcagtttccgatattttgttatggcaacctgaatgcactaagacaatgagtgaccttttacaaaggacctgaataatcattattttccattttggtatctgttccatcccatattctctaatacaaaatctgtcccaaaacactaatcctgaacctaagattgctgcagctacctgctgaaaccatctttctcagtgtacttttttttttttttgagacagagtctcactgtgttgcccaggctagagtgcagtagcgtaatcttgtctccctgcaacctctgcctcccaggttcaagcgattctcatgcctcagcctcccaagtagctgggattacaggcacgcgccaccacactcagctaatttttgtatttttggtagagatggggtttctccacgttggccaggctagtcctgaattcctggcctcaagtgatccacccatctcagcctcccaaagtgctgggattacaggcgtgagccaccacatccagtcccacagtgtcttttaatatatttacatttaatggccaggcacggtggctcacgcctgtaatcccagcactttgggaggccaaggtgggcagataacgaggtcaggagatcgagaccatcctggccaacatggtgaaaccctgtctctactaaaaaaaatacaaaaaaattagccaggcgtggtggcaggcacctgtagtcccagctactcgggaggctgaggcaggagaatggcgtcaacctgggaggtggagcttgcagtgagccaagatcatgccactgcactccagcctgggtgacagagcgagactccgtctcaaaaaatatatatatacatatatatttacatttaatatatttacatttaactaccaacatagttggtatttttttttttttttttttgagacgaagttttgttcttatcgtccaggctggagtgcagtggcgcgatttcggctcactgcagcctccgcctcctgggtttgagcgattctcctggctcagtctctcaagtagctgggattataggcacccgccaccacttccggctaactttttgtatctttagtagaggtgaggttttaccatgttggccaggctggtctctaactcctaacctcaggtgatctgcctgcctctgcctcccaaagtgctgggattacaggtatgagccaccgcacccagccccatatttggtatttctaccatacatctgtgttttctattcgtctcaccctttcagtttcttaactctctaattgccttcttttgaacttttttccttccattttttcctttctattagcttccaagttatgcattctatttttggacttttaatgataaccctagacatttcaacaagcacactttactaatcaaaatctaagatttaccatctttttttcccttcaacaatacagaaccttagttactgcatccatccatattttagttgtattttgtttttcctaactcccaagatattattattattggtttatgaagtcattgtttattccgatttttacagtaaatttttattcattttcaaatctgcttggtcaattttatggtcgtttattctttgtttatgtcttcaacctctcgtactgtttatttaaacatttctgtgtttgataactcagggcattttctcatgtctaattctagaagtttttttggtttgttttgttttgttttgttttgctgactcttgctcatcatgctgtgccagtcttttcattcatgacttctgagtatttgctcatatttctttgaaattatatgtgattatttgtgcctaggtataaagtggaaagtgagttcccccaaaaaggaggatttctggccagacgcggtggctcacgcctgtaatcccagcactttgggaggctgaggcggaggctgaggcgggcagatcacttgaggtcagcagtttgagaacagcctgaccaacatggtgaaaccccatctctactgaaaatacaaaaattagctgggcatggtcgtgggtgcctgtagtcccagctactcaagaggcagaggcaggagaatcgcttgagcccgggaggcagaggttgcagtgaacttagatggagccactgcgctccagcctgggtgacagagcaagacttggtccccccctcccccccaccaaaaaaaaaagaaaagaaaagaaaaaaaaggaggatttctgttgggtgtctgggagaattaccaacccaaatgcactttaaatcttaaatcaactttttggcttgaggtttttgtgaacacctaaagtatacattttgtctgcaagcctacataaagtcaggattatgatttgaaaaatcagggattttcccctgtgcctgttcagttcaggtttccagtcaatgtattttattcacagtgtaatggagggccagggtcagagacagattaattccttatttactcttacaggtgaaactgtcagatgtcacctgtcatgatgttggaaacagaaatttatgtgttagaattttactaaagtttcgattttggcattagaaaaagcatcgtcatctgtggtggtgtctgcccttgtcagtcagtgcctagagagaattttggggatggtagtaacaggacaatcccccatttctactgaacatcctcagtgtctgttccaagtagaattcaagttatgctctcaaggtggaagttgcctggggaggacatccttgagtacagctcaattttttttctttcttttagagatgaggtctcactttatcacccaggctagagtgctctggcatgattctagctcactgcagcctcaaaccctcaggctcaagagatcctccccgctcagcttcccaagtagctgggactataggctcacaccatcgatcttggctgtttttttttattttttgtaaagatgagatctcactttgttgcccaggctggtctcagattcctgggctcaagcgatcctcttgcctcagcctcccaaagccccgggattacaggcatcagccaccatgcttagctacagctctattaataggcacaagttcttcaatattcactgagaccccagctctgctgggaccacaggccatttttcttcccatgttgtgatcttgcccaccatgcctccactttttccccatctgcctggctacttagttgaaaactctttctgctcagcctttctagctccctgtgggagcttgggccacaccccacctgaaagactatcctccctcaatgtccccagtcccagaaatcatcttgaacaagtaatctgtccatgagctgctccccattcagacctctggccaggttgtggcctcctaacctcagtccactcagctgtggcctccatgatccgacccagacagcctgctctcttttcttctcatttcttcctccctcttacccttatctttcccatgctcctgttcacatgttctactccagggctctatttttgtgtacaaaatgtcatgattacagctctctttataacaattccaacccccattccccgctttttttccccatgagaggtcagctcccgagttcacaggcccaaatgtgagtgatgcatagaagggacagagtgtttcctctgaggcctctacacatccctgtccagtcttttcattctctgtggttttctcatttctagtccaagaggcccagaagcaaacctggaggtgagacccaaagaaagctggaaccatgctgactttgtacactgtgaggacacagagtctgttcctggaaagcccagtgtcaacgcagatgaggaagtcggaggtccccaaatctgccgtgtatgtggggacaaggccactggctatcacttcaatgtcatgacatgtgaaggatgcaagggctttttcaggtagagttacccatcagccttcacccacgtgccaccactgacccactgggtaacgtctcagggcctcagcttgacctgtcccccaggttcagagtgtgggctggtggcccacccaaaggccttgtaattagtctcaagggagccatttatatcccagaggaatccttcatcttcagtcttcctgttctacccaggaaaggtctccttccattaagatatcccttggtttctccatgtgctcttgaataaaatggaaaatgactcagtgaaagataaggaatttgaaaatcccaaatccaagtgttcacatccgccttctggggtggttgttacataaagaatggcataaaataaatgcttagaccatgggaagagaaacagaccgaagggaggggaagggcggggaggggagaaagccatgtgtgaggaagcactccaggtgcaccctccggagggcacagggtatgcaaggagcagctcccatctcgggagccacatgtgggaccctcatgcattcccaagacagccagcctgacagccctttgcagagttcttcgtggtggctgggcattcaaatggaaaagggcaggttccagggagaaatgaacattcgtgttgcatgagttataacaggggtgagacacatcagcagtgtcagactgggttcagctacaagtcacaggacacttgtcgccaattggtttggcaataaggaaaatgtgttacctctcctaacaggaagtctgaaggcctccaggttagtgagttcagcagctcatttctttccatttttctcttcagccatcccacctgagagctctgattgcagtctggctccccttgtgggggcacagtgctggggccccaggcaggaatcattatgttcagcagaagcgcacaaaggcccatctttgagagtaaggaaatctttcccaggagtcccctcacattggctagagccgggcccagcctatgcctgaactagtcactagcaaagagcagcaggtatgtccctgagctgggcacacgccacttgactgtgtggaagagggtggatgtctgcaccagctccagatgctgctggcacagaagaggctgcccaagcagtgttcgtgcatcctgcctcagcatgcaggaatcttctgctctcccttcctcatttgggtactattcctgggactctcagaaaaaggcaacatgttgtagtgggcaaaagctaaatccagtatcaggcagacctggattcaaatttcagcttgtcatgtacctggaggacagctggggatccatcgtctccaagcctcagtctccctcatctgtgctaggcagatgagattatgagtttcacagggttttagaactaaatttacaaaactgcaaaatacctagcctagcatctgatacatagcatacctttaaataatgtgagccccggtttcatcttttacccattctcagtggactttgatgtagcatcagagttttcttacccaggccagttgggaaggcaaaaggcagggatggcatctgtgaagaacatgcccctgggctggtcactggtccgaggcccgaggcctccaagctcaaacctgccaggtcactgcgggcttggctcagcttcccaggcctgccctcggggacctctgcagccctacctggctgttccatgctcctgggccagccttccctcagtttccactctggaccagaatcagaggccagagccaagggagagattgtttctttccatccagctgtggagatggggaaagtaaaggtaggactgcactgaccgtgtcttttgtgggacaggcaggacttccgggctgggaggaggagatcttgtaccagagtctccaaaaggcatctgccccattgcctctctgcgcaccgcagagaggggtgtgcgggcccgtgggtcccgcctgcacgctctgctgttccaggcgctcgacctctttgccccctaggtcaacgaggggaatccactctgccatggggaagtcgctgccccgtagggtataagaacttccccatagttcaccccttcctccctggccgcccagtctggaaggggagctggagaaggcggcggggggtggggggaaggcgggggggaaggcgggggggtggggcgggcttctctggtttcttaccctcctggggtcaggtttcctcagctccctcccttaaggaggggaaatcgaggaagaggcccatctccatggaaactttctggtaacaaggctgtgaaagagaaggggacaggtgtttcaggaagaagggaaggcgctgaggatgggcctggagaggaagtgtccctgaaagtggttttggggctgcccgcgccagcgaaaagcacgtgtcccatttcctgccggaatggccagaaaaggtctcctccccggctctgccccctctagctgagtcctggacctctagggactcccacctacacccttcccataaagcctgacccagctgggacgcaaaggctagtgtccccctccccgagtcggtaggggctggggagggaggtggtatggcccggagccccaggccgagggcccgggcacccgtgcatccccccttctgctccccattctctcacaggagggccatgaaacgcaacgcccggctgaggtgccccttccggaagggcgcctgcgagatcacccggaagacccggcgacagtgccaggcctgccgcctgcgcaagtgcctggagagcggcatgaagaaggagagtgagcagtgggcgcgcgggcgggccggcgccggggtgcacggctctgagtaaggacgtgccgtgggtgtgggcatgcttgtgtggagatgcgcgccgagtgtgcgcgtgaacacacgtgcacatgtgagctggtgtccgtgtgcaacaggcagccacctgggggagcgcttgcagtcggccctctgggagatggagggagtcggtaatctctgccctgggatgtgtgctgggcagccctggacagggcgtgccctctgtctcccctcagttgctcctgcatcattctttttgtccccttcataattgttgtaatggtttgaaaccacatttgcgggtaggagtgtgaatctgggggagggaagcaggagccacatgggtgataggacccggggccttctaggtgctagccccatcagctgccccagacctggatctttataggggaactgtttgcagacaggtgacatgaggtgttctcattctacctatttaactttgatatatttgtgctcctaggtcactatgagattaaggctcatgcggaaaaggctaggtgtttctagtgcatatttgtctccatggaacacaaagggacccaaagctgcttctttcaaggacaagttctctaggctgctggcaggcattcttgatctctccccaccaaggacctcatagctttgttctacacacatgagtgggctccagaaatccacagaagaccctaaggctctgggctatataagaagtctctggagttgctatttcttgctaagctgtagcccagctctctagggtcttggagacccagacacctctgaagagtcttggtatataattcaccagaaaatgataattgtagatgccatttactgaacatctcttatgtaccaggaactatattaggcaccctacatgcaaggtctcatttaacagcggtgcgaggtaaacacggtttctccggatcacaaaggagaaacctggaggcaggagaggttaaggaggttgcttggggtcacaggtagtaagtggcaaagctttcatgcaaacccagcgcctttggattctgaagcccgtgctcttgccagggccccacagtgtcctcacaaactccactgcagagggcaaaacaccagcctcacctcatctctgtcctcacccaagtgtttctccagaagagcccacaggcctcttgagtccagacaggggagaattgcttgtcaccattactttctcttttgcctaacggcttctgctgccttgagagggttacacagtggctctccagggggctggaggctcaccaggggcacgtgtgcctgagccagcctcactgtccctgcagtgatcatgtccgacgaggccgtggaggagaggcgggccttgatcaagcggaagaaaagtgaacggacagggactcagccactgggagtgcaggggctgacagaggagcagcggatgatgatcagggagctgatggacgctcagatgaaaacctttgacactaccttctcccatttcaagaatttccgggtaggaggaactgcacagtgacccgaggtgtcactgccatcttcattctcacatagaaactgaggttccccaaggataagaaacttatacaaggtcacagctaatcagtggtggagggtagatttggagagctggtcctgcatctgtgctagctcctcaaagccttagtctcattcccaaaggttctgaaagtgtggtccctgggtcagcagcatcagcatgcagattttcaggtcacctcagatctcctgaatctgaagctccagggaggggcaggaccccccggtgattctgttgcaggttcaggtttgaaaaatcactgctctctcctttaaggcaggtaggaactgggtctaagcaataagtggagggaaagctaggcagttccccagtgttgctggcattcggggctttatgaggacaggatcaggacctgttgggggtgtgacttttgtgaactggtgtttcttgatcccagcacattaactatgtctgtgctctaagtgccctccttcccctttgcactgatagatatctcaagtggcccttcacagcccaaataactggattagcccagtgacctcagatctgctcttcccatccatagcaccctaaaccttctgagtctcctgagcccaacatctggaatgcttgggatgacacaccatggttgcagtcccccttaccctccattttaaccaagcagggatgtgtgtgaccattaattcatagatccccaaagcaccttcatctgatagagaacaccagagagaagaaacaaatgctgtgtgtgtatatgtgtgaggacacacgcatgcatgtgggtgtgaatgcctgcatttgtgcatcctctcgagctgcaactgtggctgtgcatgtttggctggggcctgagttgggacctgtctatgaaagcacatgctgtctctcctctgtccacctcctggcatgtgtcctagctgccaggggtgcttagcagtggctgcgagttgccagagtctctgcaggccccatcgagggaagaagctgccaagtggagccaggtccggaaagatctgtgctctttgaaggtctctctgcagctgcggggggaggatggcagtgtctggaactacaaacccccagccgacagtggcgggaaagagatcttctccctgctgccccacatggctgacatgtcaacctacatgttcaaaggcatcatcagctttgccaaagtcatctcctacttcaggtaggacatggagactgggtggttgggtgtggaaaagaactggaagtggccaggaggttcaaagggcctggggtagatcctgaatttgggggatattggtgtcagaagaccctccttttcctgtgccctttccccgggcagccagtgctgctggggagtagagcccttgctgtatggctggttagttttgtggctgtgggcctgccagtgtctctgcctcttcacctgctcaatggaagctaaaaatgcctcccctgcagggctgttctgtgaaataagaacacatccgaagaacacccagcacagagtgggcattcagatagtcttttgtactctcccttaaaggggcaggaatcacatgttgacagttccagagcaaggaatgagaggaatagaaaagataaggctgtgaaggccatggggagggcgggtggtcctcagagcccaagggtcaggtctccccagagctagatgtggaggcaacaaccatcgggcaactggggttagtgggagacatgggaacttcctggggtggcaggaaccacagccccagaatatgtgtgcagtcgtaggattagggatggtgccaggtgtatctgtccttgggtaggccaccttgccttgccaagcctggtcaagtggggctgaaacacacctgccacaagctcctggtttcttcagcaggttgagggtaggttatactctaggagcccagaggttcttctctggccctgtaggagtcatgcgtgacttatttaatggggtgatgctgacagcaggtttggaatggggttcagatggtagcaaataagcttaaaggggcagggagagaagaatacttataaatgtggacattgggagatctttggtgaaatccagtgactgacaatttaacaccagggcttcccacttgctatttctcaaggccaccaatgtcgagcacagtgacctgaggtgtcactgccatcttcattctcagatagaaactgaagttccccaaggataagaaacttgtacaaggtcacagctaatcagtggtggaggctagatttggaagtaccaaagccagctcgatgccaggtcctaagctgggcaatggggaggcacagaagaataagatcaattacatggcatttgtagctcagtgttagggatctaaaagaaggatgggcgccagtagcacagggtctgaattcccaaggccaagaggtagtgtttcctcaaaacccagagtaagcagcctccctctcaggctgtgaagcttcctccttgtaaggaatgcctccttactggggaggtgggggcccctcccaggttgggagggagtgatccctgcaggaccggaagggtatccatgtaaccataatctcagaggcttgttaagccgcctccatggttaggcctgtgcttcagcgctaggagtggggcttcaggcatctgggctgcagggaaacagtagaaatacatgtgtgcacattaaacccaacaccgacagcaggaagcaaacatccccactactggaactcaggccaaaagggcggcactttcactctggaaaggggagactgcactctggaaagacttctgagaggggcaaagacatagcatggcctgaggggctagcaggatatactaaaggggaagtcattccaagggggaaactgaggcagaaaggaggaggccagggaccagaagccaaagcactagctgtaggtcaggatttgtataggagctgaaggagatggggccagcctgtaagggacctggatgccaagctcagtgggtggagttcccggaggttggaggggaggagaggatgctgcggggcagagctgtctgctgggttgtgaggggagagatgagaggcagccagacagcagccacagtcatcctcagggaaaggagccatcctccctcttcctctcgcccccaacttctggattatgggatggctgctggtgccggtctgtgggctgcctcccagggagctgtcctcccctccccatccttgctgccagggacttgcccatcgaggaccagatctccctgctgaagggggccgctttcgagctgtgtcaactgagattcaacacagtgttcaatgcggagactggaacctgggagtgtggccggctgtcctactgcttggaagacactgcaggtgcccgagagagcctgcctgccctggcagagggagggaaacactgcagttatgggaggaagggagctacgccaggatatgcaggttctgggatggcagggcaggaagatggaatggtggaaaacaagatattggtgagggatgattagatcttggtcagcttgctgagaagctgcccctccatcctgttaccatccacaggtggcttccagcaacttctactggagcccatgctgaaattccactacatgctgaagaagctgcagctgcatgaggaggagtatgtgctgatgcaggccatctccctcttctccccaggtgaggatctcccctaggctgcctgacatcccccccagccttatctgccctccccagggaaggtcccagtctatggccttgctcctcattcactgcgcagccaggatgggggctctcgctggtttctcctggggtcagtgggtgatgcccagccctggtcttccttcacttccctgcctgggtgactccagctctggagggtggttggcgagcaatgccctgactctgggctggactgagcttgtctttgccccatgatcttgcaccacacctccctcccctccagaccgcccaggtgtgctgcagcaccgcgtggtggaccagctgcaggagcaattcgccattactctgaagtcctacattgaatgcaatcggccccagcctgctcataggtgagcacagcagggggtgaggacccgtgagggtgatgtgagggagccgaggttcagggaaattgcccaagacttcatggccagagggtggcatctggaggtagccccagccagaccaggtccaaagctcacacttttgagcactacctaaccacttcccaggaaaaacacaagcaaacagggggacgtggcccagaaaggggcttctataccttcactggtcctcagtagctcctgtgacctactgcccagactgatgcccacagacccagagacaaacttggattttacggagcccaaggccatgaagggttaaggccaacactgagtattatagtgtgaacctataaactgaaatccttatttggcctgcacagctttctttttggcttggtgtcctgggatgctgggagtggccatgtctttatttgctcaacccttccttgtatggaggcaggaggctggaagtgccaactttcttttccatcatggggatactgaggcatatggtacatctcagacactagatccaaagctagttccaggaagggattccagcctgcagcccctaacctccacaacgactctgctcagtcctggcccctggacattaacgaaggcagtgacagccccacacccccaaactggtagctgcaatatctacattttcccacggaagtctctgtgtacaaagatgcaactcccgcagctgggtgtcgtggctcacacctataatcccagcactttgagaggtcaagacaggaggatcccttggggccaggagttcaaaaccagcctaggcaacatagccagaccccaactctagaaaaattttaaaaaattagccaggtatggtggcatgtgctctagtcctagctacccaggaggctgaggctggaggtctcttgagtccaggagtttgacactgcagtgagtccatgatcgtgccatcatgctctagcctgggtgacagaacgagatcctgtccctttaaagaaaaaaaaaaaaaaaagacacagctcccatgaatgggatgggagtggggagagtattgggcaggctgttctgcctttctcatctacagggtaaaagagaagcttacggaattcagccaagccttgtctcttggctgacctgaaatgtccagagattatgcttgtgcagcctcagagcagccctgaggcttgtgggtcagggcgggctgcacccacaatcttttctctggctggcatgcaggttcttgttcctgaagatcatggctatgctcaccgagctccgcagcatcaatgctcagcacacccagcggctgctgcgcatccaggacatacacccctttgctacgcccctcatgcaggagttgttcggcatcacaggtagctgagcggctgcccttgggtgacacctccgagaggcagccagacccagagccctctgagccgccactcccgggccaagacagatggacactgccaagagccgacaatgccctgctggcctgtctccctagggaattcctgctatgacagctggctagcattcctcaggaaggacatgggtgccccccacccccagttcagtctgtagggagtgaagccacagactcttacgtggagagtgcactgacctgtaggtcaggaccatcagagaggcaaggttgccctttccttttaaaaggccctgtggtctggggagaaatccctcagatcccactaaagtgtcaaggtgtggaagggaccaagcgaccaaggatgggccatctggggtctatgcccacatacccacgtttgttcgcttcctgagtcttttcattgctacctctaatagtcctgtctcccacttcccactcgttcccctcctcttccgagctgctttgtgggctccaggcctgtactcatcggcaggcgcatgagtatctgtgggagtcctctagagagatgagaagccaggaggcctgcaccaaatgtcagaagcttggcatgacctcattccggccacatcattctgtgtctctgcatccatttgaacacattattaagcaccgataataggtagcctgctgtggggtatacagcattgactcagatatagatcctgagctcacagagtttatagttaaaaaaacaaacagaaacacaaacgatttggatcaaaaggagaaatgataagtgacaaaagcagcacaaggaatttccctgtgtggatgctgagctgtgatggcgggcactgggtacccaagtgaaggttcccaaggacatgagtctgtaggagcaagggcacaaactgcagctgtgagtgcgtgtgtgtgatttggtgtaggtaggtctgtttgccacttgatggggcctgggtttgttcctggggctggaatgctgggtatgctctgtgacaaggctacgctgacaatcagttaaacacaccggagaagaaccatttacatgcaccttatatttctgtgtacacatctattctcaaagctaaagggtatgaaagtgcctgccttgtttatagccacttgtgagtaaaaatttttttgcattttcacaaattatactttatataaggcattccacacctaagaactagttttgggaaatgtagccctgggtttaatgtcaaatcaaggcaaaaggaattaaataatgtacttttggctagaggggtaaacttttttggcttttttctggggaaaataatgtgggggtgtggaaatagaaacatacgcaagcatacatatttttactacttattttattattatcctgtataaatctgaagactccggcgtaagaacataaaaatgaattatttaacttggcttacttataaaatgattgttctgtataaaagtttaacatatgtgcataccataattaaaatgtagtccgggcgaggtggctcaggcctgtaatcccagcactttgggaggccaaggctggcggatcacaaggtcagaagatcgagaccatcctggctaacacagtgaaaccccgtctctactaaaaatacaaaaaattagccaggtgtggtgctgggcacgtgtagtctcagctacttgggaggccgtggcgggagaatcacttgaaccaggcaggcggaggttgcagtgagctgagatcgtgccactgcactccagcctgggggaaagagcgagactctgtctcaaaaaaaaaaaaaagtaggaattaattttaaatgtctaatatttcattcaaatgaaacttcacagtaactgaattttaaagaacagataattacttagcttttgacattttacaagaagcaggccaaactttgagaacatggtaaatcatcagtaatataaatcaaagcaagtaaacatattctgtcatccctctgactttaccagatttttctgcattaaggagatatagggagcacttatttttagaaaagatactgagggaaaaaaagagcttctctttccaaactcaatgaatgcagcttttgctcccaggaattttaattatgaatccatttataattagaaatacaaatttctaatttggaaagatagatttcactccagtgtattcataaatcatatgcatctccctttccttactgaaatgattcgagtgctatttgttcaagagcctgaaactgttgtaagctgtaggacagggtaaggtgaggttaagatggaatggagggcaaatttccatctcccagtcttgatttaaaaactccagggtagttctccaaacattgaattgatatgtacatataatttatatagattataaaaactaaatgtatttcaagagtgaagaaagattcaatgttagatgccctgaagagttcacatagggtacttcctttcagtaggtctgtggatcacaagtttatgggactagaagccagattttaaccttcctactccaacatttgagtttcttctttactcccttccctgaacttttgagtaaacagaactaagcatcagtttttaggcatccttgtgaccactttttttttttttttttttttctgggtcagtgaggagaggatggagtcagtctccaaagctcagggcaaaagacctaagcaagctactgctaccatctgccccctcattagtcagggccactcaacagcctctctctacctagcccagaactttgtctaattaagtcttgacattgatgacaaatctgtgggaagggccagagtggccactcccttctggagaaagaggatgtaaggagaaacatacgtatgattatccatggcttcccagctcctgactcctaacttgtgggcctcattatgccatcttccacggcagcttgttttttcctggtaggtttccctttatgtccttcagctctcctaaatctgatggtggtgatgagtgaaatattcctacacttgagaaatgtgtgaccatcccaacacttctgtttacttcctttcacaaacttctcaatgacagggatctaaaagctaatctctcctttcctcactaccttcctagaacacgtttctaaatgacatctaccggctgggcacggtggctcatgcctgttatcccagcactttgggaggctgagacaggcggatcacttgaggtcaggagttcaagaccagcctggccaaaaaagtgaaaccctgtctctactaaaaatgcaaaaattatccgggcgtggtgtagtctcagctactaaggaggccgaggcaggagaatcacttgaacccgagaggcggaggttgcagtgagtcgaggttgcgccactgcactccagcctaggcgacagagaaagactctgtctcaaaacaaaacaaaaaaaaacgaaatgacatctaccatcactgctctcctgaaatatgatcccgaaggactgtttggtcagtactttttggaaagacttagaaactaaaaaggcaggggccgggcgcggaggctcacgcctgtaatcccagcactttgggaggctgaggtgggcggatcacgaggtcaggagatcgagaccattctggctaacacggtgaaaccccgtctctactaaaaatacaaaaaattagccgggcgtggtggcgggcgcctgtagtcccatctactcgggaggctgaggcaggagatggcgtgaacccgggaggcggagcttgcagtgagcggagatcgcgccactgcactccagcctgggcaatagagcgagactccgtctcaaaaaaaaaaaaaaaaaagaaaagaaactaaaaaggcagtctttcaggattctaaattaaaaggtcttgcaggacactaacacaatatttaactcaatcccagaacctatgcaagacagcagcaaatcccaaacaaatgcacttcagtgccagcaggaggcgcatcgcacaagtaacttctgtttctgctaatccaatcctcccctgccgcccctactggttaaatgtgtttaactgttttaccaatgttggaattagccaaccccaccaccacagtaaataaataagaggaccacactttatcgaatataaatttgtttttattgaagcagcagtcacatgaccttatatctagcctttagattaggcctgacagagtgagccagccctaaaaaaatgatgtttctttttgcactaagagacataacatgtttacatacatcatccagtattggaaatgagcagactcaaacacaacatgtgttggttacctgggaggtacagccccactgttcgtggtgtccatatattttacagagacccccaaagaccattactaataggatgaaagttaaaagaaaatacagccacaccaaatcatgaacacagtaatcaaagacagcagcttatacacatttaaaaactgtccctttcagagttgttttctttcttttctaagcagtgtctgcaaagcttcctctacatcaaatccaaaggtttccaaggtggaagctgcacctcttggggctacacaatggaataaaatcattggaaagaacaagaagtggtattgatatcttgttctgtataacaaagattaatgtttccctaattagaggaatggaaatggtgatgtgactacatattgcagcggcaaaatagtagggtgaaggaagagggttgggtactgaaataaagaccacacacttgtgaattttaatttcatttccaggctaacctactttttatttaatgcaaattacagtaccagttaactatttccaaaccaagtcacatagaacaaaatgtatttacaagggaatggggaaagggaaaaaaaacattgagcatacttttcacaaaaaagtttatatttaaaatgaaaaaaaaatcagtcacagaggcattcaagtagtaataatgttatacagattttgcttttcctttatatcaagacagatttgcacaagtgtttgcaatagtttgtatacaacccacagtcctttatatatatatatatatatatataataaattttgttttttaggtttgtttttaagatggaagtggtcacgctaattggtatgtgtacaggcccaagtgatccatcggcaacacatttataaatgcaaattttacaggcaagcagattttcatacaactatctgtatctgcctgtagacagatatagttaaggaaaaaaaaacttaaaaattaacacaaggaagtctactttgtcaagctaaccccttatgtactggttgtcattttgcttttattgcagaggtgcaaaacggagcaacaaacttgaataaaacggcataacccttgtgaaaataatccaaaccccagggattactttcaaagcctctcaaaggtagatctcagtctgggactctactgtgcttctagttgtctcttttattttcagtggctcaggtttctaccagaaaagacagattttattgtaaagcatacctacttttccacacaggggagaaaagtgtttggctctgtgattagatgatcactaacatgaacagtaggaatcagatacaatttcagttgaaaagaaagaaaaccccccaaattcctggggatctggcattggccaaacttcctttggaagattccaaagttaaatcctttaaaaaggaaagggaaaaatagatgaaatgccagtgtcttcatatccacagggatagagaatactcctctcagaaacctttgcattggtgcagacaagatgactggttaggcatacattgttaaaacataaaccaaaaatgtgtctaaaaattaagaggacttaaaaaaaatgacacagcatgtcactggaaagaaggtgcagtcttctgccttgctggaatgaacacacgatgtttcaaaaatagtaacctttggtttggtagttttttcttctattcaagacattttatatggactactttgaggcaaaacattctatttttctttcaaaaaaggccttcgtgttgggcacacagtaagaattaaactgattttttttaaaagaaattaaaatgatatttcattgagcaagggtagagatggcgggagggaggaaatgggctaagagttcccttgttaaaacaacagtcctctattggcacggtggcactccgtgcagtaactgctagtaattgcactatagcattttagaccactgacgtatcaaaacctgatactattaagaaacttcgatttataaaaaaacaattctctgtcactctctcatttgggagggaagtagataaaagaggagagagagagagcatggaaggctcccagaatctgctgtttttaagacccatggttagggcttgtggaagagacgagcaaaatttaatctattcgatatcctccagctctagggctccctggtgctacactaagtccctgaatggactaagtatgaaatgaaaccggtctcactgctaccgaggaggaaagacattcagaaccaaaacaaaggcagggcttcaacgaaatgaaattacgaatatgatttcctcttcccactcctgagtatggtatcactgaaacttaactgtggaaggggcaaagatactgttatgagtgagttattatttcaaagggaaagggggtggacagggagacatggataaaggaaaccaattaaaatttaaaaaagaacaaattaaaaaaaaaaacacatggaagcgaaggcactccaaactatatagatacactatacattgctagagttattgttacaataatacaggccggtacctactgtacagagttaaaactatatggctttaaaaagctcgtctacattttgtctgattattaaacagaatcactgccctgaacagtaactttttgctcattaataacagttcctgggtccacatatttacatacaaaacaataaaacttaaatttaaaaacacagaaagaaaatataatgtacaagcttgaatttggtgaggagctttttattattattatatacaaaaagatattcagagacctggatctcacttgtataaaagagttctgtgatcccaccatgatccttgagaaagaaaaatcacacatctcagcacacacacacacacacacacacgcacacatgcacacacaatgaaatgagagaaaagcgtgacttttctctcttcttttaccccagttgtggggggcaacctgtttcctaaaataagcactgatttttatggactctggggagtataccacgtccagagcagtgtctgcatccaaacgcttgctgggcagttggatctgaatgcaggtccatttctctatcacagacctgccttttcagattctttataaattctgtctgaaaatggtctatcaacgccactacctttaaggagttatgctgccaaatactttgatttcagacttctttcaaatcttagctttcagaagcactttataaaacataaaattcaatttgtttgatttggtttgactgagcatgtttcctttctcataaactctgatatatccagaggtttgtgaaaccccttttgtggcccaagacctcagctaaacagcgagtgaaaaccaagatggctcacagttgtctttctgggtactggttcacttcagcaggcaggacaactctcttggagagtcacacacacagttaaggagcaggacagggtgctagggcctgcaggagggctgccaacagactccacttccgaaccctctggaggacgagacccataaagtgacctaaggtggcaatgaggagggtgagggcaagttacacacaaccatgggctcagctctgcagccctacagttaccagctaaccttggaaggcatgtggggaaggagcgggtaggagggaaaggcggccatcactcaagtgatctttaaatgtaaagtacaactgattgtgccttaaagattcataggtcaagtaatggcccataagcaccaaggtgactaaagttcattttagagtatataaggcccacatagatgccaaccttaaaagtataaaacaaactagtcatgaaaatctatttcctcacggcaaacatagtccttcaattctccttgctttccaaggaatattgctttttcttcaaaaagagagactgattcttaacatcgttcactgatacacaaagaaaacagacacaaaaactcttaactgggtgtgggggaaacattcttctcatgcttcaaccagtcaattttgatactgtagacaaaaaaaaaggcagtattgaatatatgtatatataacatatatacacacatttatatcatcagctttcctataaagtcagcaggtataagtgactgtatcattctgatgtgtagtttttaatatttctaccatctgacatgcatcaataaataaatgtaaaaagcatgaggttaaaaaacaaattaaatacagattctagatttggatttaaaattagaactatgtgtagaatgtggctatttctgcaagctcaattttcaattaaaaaatatgaaaaataaaccagtagatgactgttacagttcacattatttaactacaatgtcctctcaagtgtatctttccaagggaagtaactttagaaaaaaatctggacaaacttattcacagtggtgagatgtatccctgacctgtccccttcctctgggctcatcagcctttgacctcagcagctagctcagcctgctcaacaccccttccatctcctcccaggtcactagtttgaaactgtgctaagatttgcaaagaactttggtcaggcaaacaaagagccacctgtagagcatgtgtgcctgagtcttgcttgctgcttcccctctggcagcctcctgtacaagcctctacatcactagcactaactgagagcaaaacaaaaccttaacaaatctactaagaatcttccctgtagagttccaaactttattgacctccctgggttacgaatgatacacatttctttgtctgccacacctgccaccaacatgccaaaggcaagtctataaatacccgaagatatggattaattttacaagtgacatttaagtccccgttgagttatacctgctaagctcccaaccaatttcaagctgtgcactataccaaagtctcacactagactttaaaagaaaacaaagttcaaaaaaacccatcagcacagaaaaaggttttcttcttttgtggaaggggcatgaggcaggagtcctgtttttaaagtatacaacagcagacttttaataaaaaaagattgtcgtgggagagagattgtatgttctagtgctccgctttccccctccccacaacccctcccaccccctggatctccctcaaagtgagaatacaatgaaattggtttgtatttatagatattttacaaggttaaataagaacaacaataataataaaaaaattgaacactaaaatgaacaggatttttttctctttttaatattctttccaaacgtgaccagtgttgctgagtgacactcaagtaactggtggtttttcctgtgcagctggctgctcgggactgttcaggtggagttggaagctgatgcagaagcagcattattggtctgtccacggtctccagtattagcatctgcaagtcaaaaagtcccaagagagagcatgagcaatgctataacaacaaaagagaacaagtacactgtttcaactgcaggctgtgaactgtatggccttccaagctgttatttggaacgttgttttaaataaggccaacactatgaaatctgaatttctctattcttggatttaagttcatgcctcagcatggtcctggtaccgggaagacagtgtctttgaataagttgcagactcagggagccagagaccatttcagtcaaagctcttgctacagctgggatcagctgtatatgaacactcagctggagtctagttcacttgaaaataaatgaacagtgcacagctgggaaaacttgctaaaaatttgaaccatgttacaatatgccatctgcttaagtaagtaaataggtggaggcaatgaaagtaacgtgggtcagtgttgatgggcagaacagaccctcttcattattcatagagatggaagacagacaaccagcaaaaaagaaacagcaactgcagtaccaattcacttagtcaatttaataaagcatcttgtatcaacagatgaatggataaaagaaaatgtggtatatatacacaatggggtaatatgtagccataagagagaaagatgggaggctaagtgggaggactgcttgagccagagaggttgaggctgcaagtgagccaagaccacctgggagacacagtaagataccgtctttaaaaaaaaaaaaaaaaaaaaaaaagagagagagagagaagaaagaaaagagaaaagaaaaagaaaaagaatgagatcctgccatttgcaacaacatggatggaactgaagtcattatgtgaagtgaaataagccagacagagaaagacaaactttgcatgttctcacttatttgtaggagctaaaatttaaaacaactgaactcacggagttagagagaaggattgttaccagaggttgggaagggtagcgggggtgggggaagtggggatggttaatgggtacaaaaaaaaaaatgtataagacctagtatttgctagcaaaacagggtgactacagtacaaaaataatttaattgtacattttaaaataacaaagtatgactggattgtttgtaacataaaggataaatgcttgaggtgatgaatatcccatttaccctgatatgattattacacattccatgtctatatcaaaatatctcaggtaacccataaatatatacacctactatgtccccacaaaaattaaaaattaagaaaaggaaagcatcttgtagtcaaatcttgacgtagaacttacttagagcttactttgccctaatcttttagaaatacgtacaactctacaactaaccattatctcctccccccttttaaggtctattattatttcacagcatccattaacatttaagtgggcatctaactgtgtccaaattggtttagtagactgctgttttagtggctatcaagttgcatccttgtcatctctcttaatgacagagaaggtactgctggccaaattttctcccaaagatttcacactaagccctgagcaagagaggtagcttgactgggatgggcaactttgaaaagccatctctctagaagccacaatg

SEQ ID NO: 363 - DNA, 63861 bp, Homo sapiens
taaactatgtctatatattgggggctgggagaggagtaggttaaaaataaataggagttgcaagtctttctcctcgggctactaataatatacctgaattttatgtttgattttgtcttccttgtctttatagtttttgcaactaatgtatatatgtctaaacaatctattgcttaaatttacataattttcagctttacatatgtagaatcatgctgtttgttttcttctgtacctcagtttttttcactaaaaattgtcttctgaaaaaaaaaagcggaggtatcatacttcctgatttaaaattatattacacagctatagtaaacaaatcagtatagtacttactcaaaaacagacacagtgaaacagaatggagtccagaaataaattcaaacatatacagtaaactaatttttgacagagacaccaagaggatacagtgggaaaaggttaggctcttcaataaatagtgctgggaaaattgaatttccacatatatgcaaaatttataaaatataagacctaaaactataaaattccttaaagagaacacaaaaagctcctggacattggccttggaaataattttttggatatcacaccaaaaaatggaaaaaaaaaaagctcaggctacaaaagcaaaaataaataaatgggactacattgaactacaaagatttgcacagcaaactaaataaccaacaaaataaaatgacagcctattgattgggaaaaatatttgcaaaccatgtgtctgataaggggataatatccaaaattaataaagaactcatacaactcaataataggaaagcaaatagcctgattttaaagtgggaaaagaacacttgtcgacatttctccaaataagacatgaaagtggccaacagatatatgaaaaggcacccaacatcattaatcatcaggagaatgcaaatcaaaaccgctgagatatcacctcacacccattaggatggctgttatcaaaaaaacaaaagacaaattttggtggagttgtggagaacagggagccctggtacattcttggtggggttatagattggtacaaccattatgaaaaataatattgagatgtctaaagaaatttaaatgagaaccatcatgatctgatcaagcagtccttcttctgagcatagacccaaagtaaatgaaataatcacctcgtaaagacatccacactcccatgttcattgcagcactattctcaatagccaagatatgacaagagcctatgtgtctgttaatggacaaatggataaactgtgatatatacatatacatacacatatagttctcttacactgaatgtatattattcaatattgaaaaagaagattctgccatttgccacacatagtgaacctggaggatgttatactaagggaaataagtcagacgcagaaagaaaaatattgtgttatctcgcttatttgtgaaatctaaaataaaaagccaaatatacagagatagagaataaaactgttgttatgggcaggggatagggagatgtaggtcaaatatgtgggctgaataagactagagatctaatgtacatcatgaggaatacaggtaataaaattgcactgtatttgggaaacctgctgagtagattttagttactcttgccacagaaacaaagaagaaataggtatctatgtgagattatggatatgttaatttgcttcactatatgttactatctatatgtatcccataacatcgtattgtataccttaaatatatacaataaaaatgtatttaaaaaattatcttctgggatttgttcatgttgaggcatgtaggaataattcatttttcatcactatagagtattacattttatgaatatgttataatttacagcataatttatttttgctttgggtgaatattgaaatttttatagactgttatttatttgtgtgtctgcttggctcttacaaacacgcctgccttgaacattcttgtatatctcctggtattcatatgcaaaagtttatctaggtttatctacctagaagtagaattgttgagttattggacatgggcacctttaactttatttactggataatgccagctcgttttccagagtactaatttatacagttatccttcagtatctgtggaggattggttccaggacttcctatagatatcaatatccacagatactaaagtcccttatgtagaatggcatagtatttgcatataacctatgcataccctcccatatactttaatctttaggttacttaatatacccaatacaatgtaaatgttatgtaaatggttgttacactgtattgtttaagagatagtgataaggaaaaaagttggtacctgttcaggacaaatgcaagctccctcttctttccaaatattttctatccatggttggttgaatccatgaatatacaacccatggatacagagggccaactgtactcatacttgccttctgttattgcttgagaatctctccaacactttttattatccaactttttaattattgctggtgtgattggtacaagtagtattttatgttattttaatttgcatttcccatatgtttgttgccagtcctgctgtctttctggaaaatgcccatttttgtcttttgcccattttttctattaggttgtctgtgcttttttcagtgattttgagttttaaaaattatcttttgagttccatatattttggagactaatccattgctaggtatgtatgtcacaaattggggtttattgatgaatagaattattcattttaatgtagttcaatgtattaacctttttctttatgatttgttttagatgtcttattaaagaaattcctacctattatgaggtaatttattctcctttatttccttctaaaagttttaaagttttgcctttcacttgtaagtcctttgtccaacctgaaactcgataatgcatttccaattaagttttaaaattttctccataattgccttacatattgagataattgtatgttttctttcttcatagtttgttaaggtagtattagagtaataaacttgagaacgtttaatcaacctgcattcctgtaacaaattcaacttgagcctgatgtacgttgggtaatttagtttgtgaatatttccttggtaactttcatatatattcataaaggatattaatctataattttccttggttttgatctcacagttattttagcccaagaaaatcttttaatgcttttatccttaaagtgtattctgttaatattagaatatcagcattacctaaattttattagtgtgtatgtatatgtgtatatatatatatatacatatacctacacatatgtgtttgtgtagtcattaagctgtacacttagtatttctgcatattgccatatgtaaatggtacccaataaagtactattgttgtttttaaaaagaacataataagcaactaagaaaacatggactattgagctaccaccatcaactttcagtcatggagaatggcaggtgaaacaaaacaaagacgcataaaccaaagcaaaattccaaaattctttcattttggaaacaaaaaactttcattaaaaaatttctttgatgttaagtctgttggtagaaatttcagtttttgtcttcaaaacgtttgtttataagaaactagaagctttcctgccaagatcaagaacagggcaaggatgtcccttctcaccactcacatttcaagatgatactggaagttctaactaatgcagtaagatgagagaagaaaatatatgtacagattgggaaggaagaaataaactgtattcacacatgacataattgtttatctagaaaatctgaaagaatcaacaacatcaaaaaaattcctggggccaggcacagtggcacatgactgtaatcccagcattttgtgaagctgagacaggaggattgcttgtggccaggagttcgagaccagcctgggcaacaaagcaagaccttgtttctacaaaaataatttttaaaattacccaggtgcagtggtgtgcacctgtagtcccagctacttgagaggctgaggcagaaaaaccacttgagcccaggaatttgaggctgcagtgagctatgattgtgccactgcactccaacctgggtaacagagcaagacccgtctctaaaaagcaaaaaaacaaaaatgacaacaacaacaaaacaaattaatagattatagtaaagttacggtgtagaaggttaatatacacaaatcaattgcttttctttacactagcaaagaccaagtggaatttgaaattaaaaacataataccatttatattatcttctccaaaaattaaatgcttaggtataaatttaataaaatacgtacaagatctatataagaaaaaccacaaaactgcaatgaaagaaatcagtgaaataaaaagatggagagatagtccatgttcaagtataggaaaactgaaaattgtcaagacatcagttcttttcaatgtaatctatagattcaacgcaatcttggtcaaaatcccagcaagttatttggaggacatcaaaaaactgattctaaagcttataggaagaggcaaaagacccagaattgcccacacaatatttaaaaagaagaatgaagtcaaaagactgacattaccaaattttaagacttactctaaagctttgataatcaagacagtgtggtatttggcaaaacaataaactaatagatcaatggaacagaatagagagctcaagattaaacccacacaaatatagccaactaatcttggacaaagaagcaaaggcaagtcaatagacaaaataatcttttcaacaaatggtgctggaacatctgaagagcaacatgcaaaaaaaaaaaaaaaagaatatgggacaacttcacatctttcacaaaaattaactcaaaataaattatagacctaagtgtaaaattcaaaactataaaactcctagaagataacataggaaaaagcctatgactttgggtatggtggtgactttttaggtacaacaccaaaggcccaattcttgaaagaaataattgataaattgagtttcattacaattaaaaacttctgctctgaaaaagacaatgtcaagaaaataagaagataaaccacagactgggagaaaaatatttgcaaaagacctatttgataaaggtattgttatccaaaatatacaaagaaatcttaaaactcaacaaaagaaaatgaacaactcaatttttaaaaaatgggccaaagaactaagcaatatctcaccaaaaaagttatacagagggcaaataagcatatgaaaagatattccacattgtatgtcatcagggaaatgcaaattaaaacattgaaataccactatacatctattaaaatggccaaaattcaaaactccaacaacaccaaatgttggtgaggatgtgaagcaatgggaactctcactcattgctggtgggaatggaaaatggtacaggccctttggaagactgtttttcagtttcttacaaaactaaacatactcttaacatatgatccaataattgcgcttgttgatattcagccagaggtgatgaaaacatatgtccatgtaaaatcctgcacatgaatgtttatggcaactttattcataagtgccaaatcttggaaacaatcaaggtctccttcagtaggtgaatggttaaataaactgtggtaccttccgacaatgaaataatagcactaaaaagaaatgagctacccagccatgaagggggtacattaaacgcaaattgctaaaatccaatctaaaaggctacatattgtattattccaactatagacattctggaaaaggcaaaactatagagacagtaaaagatcaggagttgccaggggttagcagaaaaggaaggctgaattggtggtgcacagaggatgtttagggcagtgaaactattctgtatggtggatacgtgtcattacgttcgtccaaactcatagaatgtacaacaccaagagtgaaccctaatgtaaactatagactctgggtgataacgatgtgccagtgtaggttcatcaattgcaacaaatatgccattctgatgccagatgttgatagtgggagaggttgtatgtgtgtagggttgagggatatatggttacactgtactttctgctcaattttactgtcaattttacaactgccctaaaaaatagtctttaaaattgtgtttatttctcctttgtttttgaaagatagtttcaatagaaatatctgaaaacttaagttgtaaacactttgagtattccactattgctgctgaaaaatcagctgtcagtttggcagtgttttgatggtaatatctttttctggcttctttaaagactttttttattgttggcattctgcagtttcaccatgttctttctaggtatgcatttcttcttatttgctttgttttcattcactttttttttttgcatcagagagtttgctctttcattcattctggaagattataaactgctgtctctctaaatattttgttttctttttctattgcctcctttaactccaattagaaatatgtgagactccaccagttagaatggtgatcattaaaaagtcaggaaacaacaggtgctggagaggatgtggagaaataggaacgcttttacactgttggtgggagtgtaaactagttcaaccattgtggaagactgtgtggtgatccctcaaggatctagaactagaaataccatttgactcagcgatcccattactgggtatatacccaaaggattataaatcatgctactataaagacacatgcacacatatgtttattgcagcactattcacaatagctaagacttggaaccaacccaaatgtccaacaatgatagactggattaagaaaatgtggcacatattcttaatgtgtgccatggaatactatgcagccataaaaaaggatgagttcatgtcctttgcagggacatggatgaagctggaaaccatcattctcagcaaactatcacagggacagaaaaccaaacactgcatgttctcactcataggtgggaattgaacaatgagaacacttggacatagggtggggaacatcacacacctgggcctgttgtggggtggggggaggggggagggatagcattaggagaaatacctaatgtaaatgaccattaatgggtgcagcacaccaacatggcacatgtatacatatgtaacagacctgcatgatgtgcacatgtaccctagaacttaaattataataaaaaaaaagtaagactcatggtcttgtcaaaaacagcttcctagaattacttcgtctttgtcgaaagccatagaaaatatatcctgcgtaggagtttttgaacttgcccttaaaatctgcctgaaccctaatcttcctgaattatcttctgctgttaaaagtcaattgcatagaatctgaggggatacaataacaaattataatgttttatgttgatgaattcatttgtaggagtcacatcaacttgattattgacaatatggatgctaagttttggatctctatgatgttatcgaaatgtgagatgatccagtctccttgttcatgaaaaatgatgaaaatgtgccatggtggaaaaggagtgggtagtgccactgatcaatgccatctgcagatttttaaaatatagtttttagaaatttgggccataacaaattaataaggagtttctagggcttccagtatatggcatggatacaacactaatttttaaaggagatttacaactcttttttattatttggtttttagaaggcatttctttactcattaataaaaagaaccactcatctgttcctcataggcataaacaatagggaaatggatagccttattcactgctgctgaatgtctccatctggatatatttgatagtatctcagggcaaatatttaaatgccactgcctcagtatatttcttaacattgggaaagagcacatcctgaatgagaccctgtagggaagtacctagtaacggtattcaggatggccgcctccgtttttgacagatcactttgtaaaataaataaaacctattatgccaggaatctaagctttgtctagaacttccaatggcaagttctctgtatataaaagtaacaatggcaccattcaatcaaccacttttgccttagtaatattaagcaagaaaagctaagtagttgttttaaatagaatgaaaaggacaggaggagagtgaagatactatttgtttaagtggaacagcttggaaataaaaatagtcctgtcatatatacagaatggtaagaggaatgatttgatcaatgcaattatttattgcctgcctactctgcccaacttggttccagttctcacagcacttgcattgatcaaaagttaattgcaagggcctgtcctgaaaaacagcaaacaaataaaaaatgtacagtttagtataatatttagtaagagcttatatacgttgtaggcactcactgtgctagatattaggacacaaagaagaaaaagacatggttctcctcttgtataattatataaactaatgaagtcatataagtcactttagaagacatgctattatagattcttgtcaccatgtgagttgactgtacatcaatgtgtgagtcaggttcaccacaccccgacaaaaagatgaagctgacattgcttatggcacagaaagctccattgtgtgggcctggcacatgagagaaggtgtgcctcagacgtgattgaattctcagaggatagggtgaagaagctggaaatgctcttcctaggagactggactgatgaggcaggcatcagtcaccagcccacgagaaacaaagagtcattgattctggtgccagcctcagggcttctgcagcagagtttgccccagactatcagatagagttcattgccactctctcttcaccatcagcaagcagagtcaggaattcctgagaaaggagtgcttgtccagaagcagaaaagaagaggttgaatgcaggttattttttttttactattattttggcactaagtagaatgacaaagcaatatactccatgtgatttcataaagctttcataaaacttcaaaaacaagagtgaagaactgatcagttagtattccaatgaaactaaattataggtgccatccttcttattcataaaaccttcttgtgttctcatttcttagctagagaatgggagaaaatgaatttttttttttttctgagacagtcttgctctgttgcccaggctggagtgcggtggcgcaatcttggctcactgcaagctccacctcctgggttcatgccattcccctgcctcagcctcccgagtagctgggactacaggcgcccaccaccacaccccgctaattttttgtatttttagtagagacggggtttcaccgtgttagccaggatggtctggatctcctgaccttgtgatccacccaccttggcctcccaaagtcctgggattacaggcttgagccaccgtgcccggccaaatgaatttttttaaacaattttttttccaagtcattatccacattaatggggaacgtgctgaattctttcgtgaaaatctcacctttacactggagatattggcttcatacaaattctcccaggatagatgatgacctaaaaggtatgttccttttctctacctgatattttctacaaaatcaattatttttctcattcttcattactgattctatctcctagtatattgttggcagacataagtataatatgggaagtatgtacactactttgacaggaagtactaacagtttaatctgaggtctgtgattggtaagaacctgagtgtggcatacatgtgtgagcttagggttgagttcatggaagatactgactagactgagattcatggggaaaaaaatgatgacctacattccacttggtcaaagcaagtataaaggttattgttgcataaatcaaagataggcctacattaagtggaagtctaaaattttagattggattttgagaggtagactttcagggaaatgatcttatcctagctgggggagatctaacactctagagaaggtgggaagggtacagaaaaggcaatcattgtggaaagtagtcacgaaatggaaatgttaatttccattaacatgagaaagagagggagaactttgcaaaactctcaacctttacagtcagctttaggtagctaaaataaatccacagatccactctgacttttcatattcctttccacatttggatctacttccaacattttatcctctgtgcttttaaatgttgtgaaatatctccgagaattcctttaatgtgaagctttgtttgtttatctgttttggctagcatcactacccctgggacatcttcatccttttagtcacaatcactttcctcacttacatggataaatttgccttctctggagtctctaaaaggtcagcagtgtcaacattctccctgtctgctctttcttctatagttacatttgcaacggattcggattttacttccagtgttatcacataacatttatttgtgcactttcgtctttcttggccagttctctcttgcatttttgtaaaatgtcatgtgagtttatcgctgggagacaaggaagcaacacagctacatggtttgctgtgtgtgcatgaactgtaatagttatgcaattacacccagttaatatattatggtaactgaaataggaatcatatttttgggagcctagcactattcaactaatttgtaataactaaaatttgtgcatactgtaaatgtgcaatgggagggttgcctatatattcaaaggacttacactgtaattgtccataagcttcttagcttaattttaatttttgtacccctatgaaatttgctctaaggatattttataactgagggtggcttttctccacttgtttggaatggttttcttactaattcaaaataaggaggtcttactagttttgcatattttttatcttgtgaactggtatgcattgtatggttctctgcataagtaaatgctattcaacctcagtgataatctagaaaattttagtctcccatgaagatgagatgtgaatttagaatgcagacaaaaggtaattatttccatgaattcattataaaaagaaaaaaatctgaaatgttatgcttcccatttgtttacttgacatgatagatctcttttcctttctagcatttttgcagggctatttcagctactctcactttattattggctttacctaaaaattggactttttttcttaagcaaaacacgcaattacgccttataaatgttaggtatttttggagggctaaagaaacatgtcttttacctagtgtgctgagagaagattcctccaaaaagggactgtctaactttgaccagctaagctgctctctgtcacttcagtgttagaacaaccacactccataggaccatctttttattttttggtatatgtcttcaattttcttccattcatagatctaccaagtgcttcactcacacatctcttcgaagatctggccaatgcaagaagcaggacaaaggcaactctgcacatatatgtgtgcttttgcttatcaaaaacatttttgcccgtctctaaacttgattgcagtcatttaatgttttcatttgtatcaaacaattaaaatctgtgtttactgtattcaataacattaattagtcaattgcttcaaagccattttcttaccaacataacagagaagaaatgtatgcttcagataagctggggctctgaagaattcattttggcaaaaaagaaatatattaaacatatgtgaggtcagaaaatctactcctatttcatagtattaatttattcattctattaattggtcttttgttaagagctccctttttcttttctctaagtattctctaaatagtacagtatttcttcattatcaccatgtttctattttttattcacatatatttccttatttatatatacttaaaaactatctttccctcttaaaatttctttcttttttctttctagaaattgccagatccttcccttataacttcttcttcctttttaacctcacttatcttgctactgaaatcccaagaataatgaggctatcttctaataaatgcctttaggtggactgtaaaagctattttccttttataaaattaatatgcaaaaatcagagtggacctaaatttctattgtctagtgagtttataagctgaaaagaatgaaagtgtacaaattattattaaaggtgcccatatttgtatttttataaacagtggctccatgtacactttgtctacacctgggaaggtatctggattatggccaaagccagtttgtggacttcagcttcaccagtagcttctgccaagttatttgagctgaggtaactaaaaaaatgagctagccaaccatttattactgatgataaaagagaagaatttgcattttctaaaaaattaagatatgtatttctgttatttttcactcaaaaattatttagcctttaccattccctagaacattactttgagtggagttacatcagtgagcatgatggtcaagtttcttgacctcataaaacttacagtctattgaaattaatatcctaacactattcatttgattttctgttaatctttaatcctctctttgcaagttgcacctatatagcatatgcttagtttcaaaaattaaaagaaatgaatgttattagagtttcataacaccccttgagatacttagagttgccagaaaaaatatagaactccctgttaaatttgaatttcagataaacaataaataactttttatacataagtatgtcttgtacaatatttaggtatatcttaaattggatatacctaaatctggaaagtctaaattagagaatctctggatgtcatgaaagcaggaagagtgacattcactatcaacagattcactgtgatggcaacagcctgtccagtctacatcccacaacccctgccattctcatccccaaccctggccacccaataaagagtattatctcaaaatcagattgatactgtacttcaaactagctagtcatctcattcatcttcagcatatgtgcttattaatgtgatgttttgtatataatagatatcatacacagcatcctgtctactatccatacttaaaaatatgtctaactgatcaagtcataggagattacttccaaaatattctgcataaagagcaacctgaaggaaaatcagtaataaggcatggctcaatttaagtggctaaattatcacatttatattttgggtttataaatagtcctgagtatcgatttcgaattaggagatcaaatgtttttattccaattctaggacttttaccttttgtccacattttggaggatacaggaaaacagaaaacacgatcgttatcctccaaaatgaactggtggccttgcttgacactctttgtacacttgtgaaattgacagggtttgcagcatctagaagtcaataggagaccctttgggggataaatgctcaaatgggtgtttcaaacattaaacctagtaggtgggagagacatgggctgggaaaatcttggtagaaatggtaggacttgacaggaagaaacatgatctaccatgtaattaaaatacaaagtgtgacatattttaaagaaatacaagtatagaaaaactaagtttatattataggacttagtgtagcaatgttgcatgtgatgtctttagacattgcctcagtgtcagaaatcttattattgtatcatatgctggaaaaattatattaatgaaattggagtctatttcagttgctcactctaagtgaaatgtaaacagtctgattttcttcaaattaaagagttttttttaaagtataagaaatatattcaaggccaggcacggtggttcatcccagcactttgggaggctgaggcggtcagatcacctgaggtcaggagttcaagaccagcctgggcaacatggtgaaaccccgtctctactaaaaatataaaaattagccaggcattgtggtgggtgcctgtaagcccagctactcaggaggctgagacaggagaattgcttgaacccaggaggcggaggggcagaggttgtagtgagctgagatcccaccactgcactccagcctgggcaacagagcgagactctgtctcgaaaaaaaaaaaaaagaaatatattcaaaatatgagatattatgtgcatgtaaaattctaaattatatatctgtttgatatgattatgttatgtttttgttaaaaattaacattttcaataacaaataaactgtaatttttcttttaatcagtttattattttataattatttaacttcattttctgatagctgattttagaaattcatataccttaacagtttgagaacagaggatcaaaataattaaatgaatttatttacacttcaaaatcaacaattagaacattcaaacctaaaggagtatgatagatgctagtatttctttataaataatcttttctaaagtctttgattttggaatatgatcctacttaagcacactgcaagttttctttttttagctcattagcattttgtacttaactaaaaacaacagtgaagctatactttattcttggcatttcttcacctaaaataaagccattgaaagccccatcttcatataaatgtaggtcttatggaatgccttggttactttagacatttggaaatgtcagaccaatagctatgggggctggaatgtgctacttcactttaataaacaagaattagaaggcagggcattgcattaagaagatttatgcatgagttgtgggaacataggcagagaccaaaaccagacagatcaccatcagtattttgagtgggaaaagtgtttgaaatggactgagatcgcaactgaagaaccactggcaagtttaattgagggccataattcagtacactagggtcaaaatagggcaaagctatggaggatgaagcccattggcttagctatataggacgaggtcagggaaggccaatgtcatcatcagacaagttagcaaggcataccgagactttcttaatgaacataagaaaaccagataagcagaagctgaggtctagctctgagataatactatcagtctccatgagttattttgataagaggctatctttaacttagaccttttctctgcatgggctggtaaaactcttccatcgacagctctgttactatgtcagtatttctaggactgtgtttgttgaggcaggtcagaagctgcattttcaaactcccaaaacctgacccatgtttgtgttgggtgctagtgctctgagctgagaccttagcagggaatttcccaaaggctaagttctccaattcccttttagcctccttcatggtacttttactctggtcctgcccccaccatccaacatcctgggctcagggccaggcttagcatcaggtttcagatgtacgttgcctataaaaatgtctctgaattggcaataattagtctgtgcaactgtatttagctctaaaatactatgtgtgctgagggattgctcttactggaaataggcctgtggagatagattgggaatgacataaatattctcaatgaatggaaaagcatatctagaaatatttcttttactctttccttatcaaagcttttaaaatgactgaactctgatcttgggttccgaagtgtctctggggaaggtcatttgaatctgctgtattgtcaggctgtctaacatctgcaaggtgattctcaacctggactcttggaaattagcatcagtgttttttggttatcacaatgacaagggagtaatacaagcatttagtggtgatatggtttggatctttatcacctctaaaactcatgttgaaatgtaatccccagtgttggaggtaggacctggtgggagatattttggtcatgagggtggatcctccatgaatatgttggtactgtcttcctgataatgactgaattcttgttctgagtttatatgagatcctggttgttaaaaaatgtagcgcctctcccactttgctcttgcccttgctacctgatgcacctgccacctcttcaccttctgccatgattgtaagctccctgaatccttccccggaagctaagcagatggcagcaccatgcttcctgtgcagtctgcagaaccgtgattcaattaaacctcttttctttataaattacccattctcagatattactttatagtgatacaaaatggactaacacaagtggagaagagccagtgatgctaagctttctataaatgcgcaagacaaaaatcctgcacaaccaagaattcctctagcactaccatgattagcaatacctgtagtgatttctagttgactcccagggcattggcactggcatttgaatgaaactttttctgctcttcctaaatacactggggattatctgctgttacaatttcatatttttgttttctcagactcttcatatcagtcaacaaaaacttgaattccctccctcttccctttactattcttcatctttgttcaccctgttctctttcctccactcttacagaaggaaatctttcatcttctttccaaagataacaacagctccattcaaagctttggtaacatcccactgcatctcatccttgactctgtctcttgcgtctttaataccctgccagtcccttcttctccttagacaagtgcttaagtgtccttatcccaaatatcaaataaaagcaaaaaccaaaactcttaaacctgccacttaactccttaatgttccttatcatttcttcagcagaaggctcagagtctataaactgttttatgcaatcactgcctctagttcctcaccatccgttggattttaaatctcttgtaatctgatttctaccctctaattctgctctcttgagtaatgcccagttgccagaaccactctctctcactcttcaaattccttggatttctctgcaaaattggatccttgataaatcccttgttaaagatcatttattctccctttgcttcagtttacctcttgatgctcctaggaagactgagaccataccaaatgagccccttcattttcttgaattctactttaatatttcactatctgtataaatccaggattctcgctgttccatctttggggctcctattcctcatcctcttcccatacactggatactgggcttgggtcccctctgctgactgcccttagccttctcatctaagtgaatgttctgaaaaatacaaacatggctagccataactcctctgttgtactccaggccaaactgccagcttcctgacagataactccacttggatgcccactgctactcctgaaattcaacaaaatgacatccaaaatattttggcatatttcttgtatagtattttgtgtttagcgatcatttttatacatgactgtttcagctaccagcctgagacttcttaaagacaaggatggtttcttattttatttcttttagcccctagcatctagcatagtgctttaaaaaatgttaattggatgataaagaagagtgaagacttgaagttcctttagaaaatggattgtgtcatatccgtggcccagtgcctagcacagctatagcacagtgcttagcacaactgtactaaacaaatattttttgagcaaatctgtcatctcttcttccaaagccacctctgttttctttcctatcaatgtcaatgataccatcattttcctggtaaccaatgtcacaaacctcaatcttctctgattcttccctggtccctaaatccagagtaaagtctggtaagtcttcctcaaaaattttaaatatttctcttttatttcatttccactgtcaccatgctagtgtgtgctttcatttagaccagtatttccaatctgctctcttgcagtctatcaaaggttcatagaagcatacaaagaaaatgaaaagagttcttcaggagcaaatatgttttggaggtagacactgggtcagatgaaagtaactaggttttattgctgagtatcctctctgaacctttcatttaaaaaatataaatatcttctaaggcagtataatatataggggtttacaaatttattttacaatggaagcatttttctgatgccacatcaattaacatctcctgagtgttccacagaacacaagtctagaaaatctagaactagactactaaaatagcattttaattgctctctctgacttgagcgactattttttcctaatctataatttaaaataatgcttaaactagacttcctgaaatccagctctgattgatagattattattttcttgttcatccacacccccaaaaaggaaatttttaatgactctcaatgacttaactaataaactttccaaatgtctagttatttttagttttctgccttttacaaacacttctgtgcccaaggaaattcatttgtatcataatagaggcattttgtcaaaagacagcattggggcttaggatgctccaccccaaaatatgactgtaggtgaccagaatctgcttctctggcatattttgagtgggaaattgcataaattgagtgggaaattgagtgggaaattctgggaaattgcagacacaggagtagctctgaaaagctccccttttataaaagaaacttacatgtatgaaggaagtctacatgagtaaaagtatctgtaccagaaagagacctgctgtgagacaacttttattacctaagagactttttatctgcataataagacaatctgtattcatcacacatttcctcccctcaccctcctgcaacctctctctaccatccactagaagcaccatgcccctattcctttactgtagctcaagatacaatagaagcttctatcatctggtacttcttcaagtctcatattttgtgggactcctgtgtgcacataagaaattaaatatggtttttctcctgttaatctatcttctgtcaatttcattggtaccccagcaaaagaacctaggaaggtagagggaagctattttttccctccccaacaaaagcaaaccttacatattttattgctctttaatttccatttcagtgagtattcagcatttgaacaaagtatattttccgtaagaatataatagttccttaagtatttggcattgaatgatgcttcttcttgtgtaagtaggactcagagttagatatttgtgcccacttttaggtttctgaaggagatggttgtacagttcagtaaaacatatatagtggcctaaagcttgtgtcatctaaacctgcccactttctaacttgagtatttaagcagatgggatatatttatttatctctaaggatattgataaatttctaccagttagttctactttctcaccctgtcccctttgttatttgtaaaatgcattttttgaacgtcctgagattagagccatttgtacaagggactgaaaactaattaccctgtgtgattccaaccttgtactcattaacaacttgctctaatcagctggataactggcaccaacagtgtgggatgttgaactgaatcattactccagaatacaataatttaaaagtagaatggccgttttcagtgtctggataatcttggaatctacacttgaaaagctaaatcctgggaaatatctagacctagaaatacactttctgattttgtcaaccagagaagcatgtggccaccacatggcttaccttctggtcagcaatatcaccaccgtccacccacctcaaccctcacacacacattgctgaaattttccagagaacaaagagcatggtttgttattcttcttaataaactcaccgtagaaagagtaattcgctcttgatgttttctctaagtaccagggaacaacacacaaagcatctttctgagtatctttgaatgactcatttcctgggtgtgctcaatcatgatgcaatcaggaaagctgcaatacatttaaatttaagatttttattttctggataagtaaaattggagaaaaatcatattcttttcggaggtggggcatctggtaacttcactaagaaggaaggagtaaatatgtttctagttgctttgagcaagccatatggtgccaatcaataccaacattggccagtgagagaggtgaatttcactcatgtgtttcaagacttagtctgatcctctgtcgtttccattcctagattctacgagatctattttctttcttgtattctcatttaatactttcaaaagattatctattatcagttgatattttctatttttctgtacatttcatcaataataatttagccaaagctaataagaaattctcctgaaagtctgatctctaatgaatactgaaaccaagttcaacacattaaaggaagtaattaagaaggcaccctattgggtttaggtatgctaggtcagccaaaacaggatttttttatttttatgagtttttgtcaaatttaaagtatgtctacattttaaaacaaaaatttaatgaaatttgtttgtagctatgctactctataaatatttattttttaaattattcttcatgtaacttaaagatgattttttttaaaataatggcctagacatgccaataaaaatacctattcaatttgcaaaaaaagtattaaataccacaggtattttctacataattatatatatatacacaagtggtatgtgtgcatgtatgtgtgtgtgtgtgtgtgtgtgtatacgtgctgtgtagcatactagccatgtaataactgttaactgtgaaagtttctaagaggtcagtcatctgtttcatcaccttacttcagaaagggctgtgcctgtattaaccgtggggcatggctaactaatgtggtttcttacctcttactcttccacctctttttattcattgaagtcacagtcataactagcccatacacagtgctcactgtttgccaagcatggttgcactttacacatactgactcacttaactcttacagcatctctatcagataggttttccattactcttcacatattacctttaaattccctttctttcccttgcttctcatttaacccaattctaactttaaataagctcacctgtctttattcttctattctcttgttcatacttcttattttaattttttcctgacccattttccctacttgtgtcacactttatcttcttgacattttgctttatctccctctatcacatttttcagtacttctgcttctcctggaatttttagctgacagccatgctctcaaggtgcaaaaggtgctcaagactcctgaaactgagccgctcacttgttcccatatcataggaataagtgaggctgagaggcaggctgggtgcctgggaagtccagtgggggtcaggcaagtaacacttctaaagaatagagcactcaccatgttagattgtgttcagagataatcactcagtcagtcagattgctattcagattagcaatcttgtgaaaagaaaggcccaaccttccctgatgagtatttcaagtgcaccctccccagcaaagattctttagagcactgcttaagaatcttgcacttacattagagtcacctggagagcttgttaaaacagatctgtaggcctggggtggggatcacaaatttgcaattctaagtagctcccacgctacacagacgctgtctgcccacagaccactgttggagtagcagtactttacagtttatatatttttctaatttttggtttaaataattctggatagagtttaaagccaatcatctgtactctccttccagtggcactgatctgccagacaactgttgagtgacattcactcattagattctgttttgtggctaaacaacaccagtttctttagctttttataaaatctattttgtaaaccttgcagcactcttacatctctctttcatgccttctaccagttgtctacatcttcctccagtgtagataggcaaactgaactgaatctctatatattttaaattggaaagaggtttgattcagacttggttttgcagattaacttttggttcctatatattatatttattaaacaaaatatgtccttatttagcacttacatataatgtaagtgctaaatacatataatgtactgcacaaagtgaactggagatttaaaaaaaaaaaaaagaactgagacacagatccagaactccagttgctttgaaactcaggaggaaaataaaacaaaacaagacaataacaaaacaaatcacagagaaatagaattttgggaactagagtggaccaattaaataccaagcattgagtaataatataaaactggaacagcaattcaagggaaaataattgagtcagtcgtgtttaactaaaaaaaaatcaggccacagataaaaatttttcatttgtatatcagtacccatataaatatactttctatctatgccacgcagttattgctggatacatagcccctttttcgtccttatttattatatcctacctcctccgctacaatttaaggcccttcagggcagagacgatgtctcacacttcatattaccagcacttaatatagcataagtatatattccccacttactactgattaaatatgtgaaagtgagtacagaggacataggcttattgggaaattaaatggtcactgtatcatattttttaaagcttatcaagtaattttacctcaaccatattaaagatcttcataggaagtagcctctaaatccaagcacagtattctacatgtagaaagactttgttagcatatattgagctaatcatttcattcaacaggtattatttactgaaagtctatctgacccagtcatagcttttcagcacttactaattcacttattcctcctggcaacatacttaggatactgggtaggaagtacagcacacagtgatgagataatctgcctaaggtcacagtggttggctgggattcaaacccaggcaatgcagcccctaagtctatgctcttgagcactgtactgcatcaccatgcctctgggaaggaatgcctgttacagtctgtctccctgcaaccaggtggcatcctaccttgcattacttgtttgtgcagagttggacattgatgcttcccaggtataagtgaggtgtgtggtacatgtgggttttgggctttgccctcacctagcactaagttgaaagtgattcagatttgaatactgtggttctattgagcttagtttgatgctagtttgaatagaatactggaacttatgtacaaagtctctgttaaaatatgtttatagtttctaaatattagattggattttcattcttcattacttgaaatttggttctatttttgtaagggaattgatcctacccacagttccctctctatagctagaatactatctcttgcattatttctttgtgcagagttggacactgaggcctccaagggataaatgggatatgaggtacatgtgtgtttggggctttgctgtgatctagcactaatatggttaaagcaattcaactttatacaatatgaatcagtcttggccacattttatcctactttgagctcctaaaggactttatattattcctgtcacacactgacctggattgttagggaaggctggtatacacccagcacagcaggactgaaatatttgtcctgtaaataaggaaataaatgaaaaaatctggtagaattctgtgtcacctgaaattcataagcagacttttctttttaaatataattgcagtaattatgaaagtatgattaataacagttcttatacaattttcagtctcctcattaagcccacattcctcttggttatatgtgcaaggaaaaaataggtcagatttatattaacagccatcaacttacaaagaaaatagtaaacctagaaacttacaaagaaaatagaaaacctaggtcaggttttcttatttaaaattaatctctgcttgaaataacatatttagaaattgctcttaaatatagcttatattcatttgaacaataatgaatgcatttagtactatgtagcaaaaattgcacagtaaaaaggaaaatatataaagtctagttatttcagttccttgaaggtaaaaaggttgagaggaaaaaataatcctttctgataccagtcttatgatacaatatatgctctgtgaaaatctgaagaaaaggtgaaaaatgtaaaaatttaaaaaatgtgaaaacagtatttaaaaaaaatagttttaaagacagatgatgggccgggtgtggtggctcacacatgtaatcccagcactttggaaggctgaggcgggcgaatcacgagctcaggagtttgaaaccagcctggccaacatgatgaaaccctgtctctaccaaaaatacaaaaattcgctgggcttggtggcatgtgcctgtaatcccagctactcaggaggctgaggcaggagaatcgcttgaacccaggaagcagaggttgcagtaagccgagatcatgccactgcactccagcctggcaacagagggagactccatctcaaaaaacagaaagatgatgaagctgtcttctgccaatcttaatgctagaataaatgttgaatgtgtaaattcttgttggtgcctgtgcaattaattaagatatttattctaaatccattttttgtttctatacatccttgtatattttcagttatactcatttacatattcaagaaataacaagaacaatgtttaaaatatcacaagtaaaggaaactattaggttggtgcaaaagcaattgcattttttgccattaaattcaatggcaaaaccgcaattacttttgaaccaacctaatattttgttgctggatgacatctaaacaacattcaggtaattcagccccctttcccctttcatttaatttcccatttctacctctcctcctttcacagttacacattttaatcacaatgccctgtttcacacttccttggtcagcaccgatattctctgaactatttttcctgcacaagcacataaacccataaacataaatacacacgcatattaaacaatccgtcacatgatggatagcacggcagcctggtgacattgtggggacgcggctgcacgtgggctctgacccagctggccttttcttggtgttggaggccgcctcttccaaggttgctgcacaggtggctggaggtggcacagtgtgtcggatgggcggtggtgtgcatatccagtttccccaactgaccagatcccaggtgatctaggctgaggtcctcagtgcaacaatatggttctggattctctggtgcttttgtcatgagactcagatgctgtgctgggtcactttctatatccagagtcttcccagtggacagatgtagaattaggcatccttcctaatgatgaagactgaaagtgtagactcagcctttacaagagccaggtgagcatttcaagagattgtagacttcatattgaagacagaaattaaagttgtttggtcaagaataataataaagctgggtgtggtggcccagcactttgggaagccaagcgggaggattgcttgagcccaagagtttgagaccagactggcaacatagggagaccctgtccctacaaaaatcagccaggcacagtggcacacacctgcgttcccagctactcaggaggctgagttggcagggtctcttgagtccgggaggtcgaggctgctgtgagccatgatcataccaatgcactccagcctcgaagagagtgagaccctgtctcaaaaaatacaataaataaaaataaaacaatccattaggacatactattaatgtgtgtgtgtgtgtgtgtatgtgtgtgtgtgtgtgtgtatgcgtgtatatacgcatattttttctcatggtgtaagtgcagtgagcactgaacagaagttataaaatagctttgtcctgtggtcattagtaaatcttcctgtgaatacttccatgagcctctactgagatattgtgacttctgtgcatactttgtgatatccaggctagtctatgatcaaaggataacaaagattgcaggtaaaaaattttggaggaaataatatccaccctgataccactctcatgattaatatgctatgtgcagacttcttgttttctatcaccaactttgtgtcctggcaaacaactttgaattctaaggctgacagcagaatgctagtgatagtgctgcaaccgtagcaaagaaaaaacaaaagatgtttctgtatgcaagttttaccatgacttaaaacttcttcaaactgattgtcagtgaaaagtgagcaaaaatcaatttaagattggtggaagcccattgccgatatgaagggcactagtaccattgctgacatttggaaggactgatctctaactttgaggaaggcggctggaagaaactattggtagacagtaagcagggctttataagaggaattaccaatagacagtactggacacacatggccataagaaccatactaatacctggaaaatgctcttcagtcttgtaaaatgctcttcattcttgtaaaatgctcttcggttaaagctgccattgttgggaacatggttttttgcctcccattcatgatgtgtgtgtatacttaaaatgcctttcaactctggaaggacccctgtggggtcagattacaggtattaggataaattcatggtttatgtaataaaccatgattttccatgagagagacacggaaatagatataaatgtatgtacgcatgtgtgcatatatgcatatgtgtgtttgtatgtcataaaggtattttctacgtctgtctgctgagataatctagaagcaatggcaccccactagcaattacatgcaaagtgtccagatttttatttctaaataccattctatacactaaaaggaacaggggctacataaaaaaaattattgattgtagaattggggttgggaaagaacaagatgagcctggaacattttatggtggcagcaagtaaagaagtgctcaaagaatgataggggctgggtgcaatagctcatgcctgtaattccagcactttgggaggccagtgagaggatttcttgaagccaggagtttcagaccagcctgggcaacaaagcaagacccccatctctagaaaaataaaaaaattagccagctgtagctacttgggaggcagagtcaggaagatcgcttggccccaggagttcaaggctgtggtgagctgtgatcagtccactgcacttcagccttccagtctgagtgacagagaccctgtctctaaaacaaacaaacaaacaaacaaacaaacaaacaaagaatggtagggacaagtcagaagaacacacaggtcagtctgaaggaattttcacaggacaaactggaacaacctgatcatcaaaagaaataaaaatattaatggatctaatccattgaataaaataatacaatgaaatccacagcaatattaataggcaggagagaatagaaacctttttcttatgatggaaatataactccttactgtagaaagaatgactagaataattaccatttggcaatcatcatcacaataactaatccagacaagaattatcaatggatgctaaaactaacggtagaaactttgaggggtaccaggatatgcacatagtctcaaagtattgccccagaagaaacatattaattacaaaaggaaaatagtaactttgcattgcataaacctggcagacatactttaaccagttgatcgatattatcatcactggtgtcaatgccttgtggcctaagaccaacaggaacacacctgcagttgaacaagatgagttattaattattgtagtgacagaggatgcacctcatgagaaatcacggggatatctcagtaagaaggtgttagacaggaattataggatttgggcttgtgttagataattttgtggaggatttaaataatttctggattggatgttctcaggaagcaggggtaattctatggttggataacttattaaatctaatatagaaggaaagaagaccagactgaagctccagctgtaattggtaaataagccacaggcatactagccaggatcaaggaatgattagtcatttgtatgatgatgacaatgtttatggttttgtctatgctcagacttgataatgaatggtcttgtcacaaggtcacagagtggccttgactgattgctctggttcaataaaatggaccttgactggtgttctggttaatagtttatgttcaacaaaagaacttcaagtctcagctgtgagtgccagtgtatctcctagcaacaccaaggttaccgtggtattctcagatcccagatgtcaggaacaaatcaacatcacttgcctactgatatcatgctttgaaaatgaaacaccatcactcctgtgacattcctgcccaaaattaataacctggatctaatcatgaggaaaaatgagaataatactaattgctggatattttacaaaatagcatgcctgtattcctccaaatgtgaatgtcataaaagaaagacagattgagtaattaatcattctacatcaaaggagactagcaagacataacaactgattgcgatgcataatttagaatttacttttgctttaaaggacattactgggatagttggcaaattctgaataagcctgtagattaggtaattttgtacgtgttaaatgttctgattttgataattatactatgatatgtaagagaatatttttatttttaggaaacatatattgaagaatttaagggtaaaggggcattatatctgaccctttctcaaatagttcagaaaaagccatatatttgtatatgtatatacatgtatgcacatacacacaaagggaagaataaaacaagatttggaaaatctgggtaaagaatatatgagaattcctcacacaattgttgcaaatgctatggatcatctgtaatgatgtcaaaatttaaaggaaaaaggaaaaaaagtcttcctcttctggtgaattcaatcttgttgtttgactcattgcattcttaggtaaaatgtctatttatacacatatttacatctaaacctcctagcttaatttttaatggccatgataaggctgacgacttgtggggtttactcagaagtatatacttcctttagcagtccttgtatttggtaaaatatgttctaattcatcttttcttctgtagataagaattgctggcaacatatgcactaaacttcgttttgaaaaatccccttgatgccgatcactgagaagtgatccacaggtgagcgtctaagcattgaacattttctattctgtgcttttttctttcgtgtgttgttgatgtcaggctgttatcaacacattctatgaaacaggaccctaggtatatgcattataacacgaaactcattataacacagagtatagaattagggataaaataggagtgaaatcatttttgatagcttcttagtgaaacataattgtctttattttaatgagtgttgttttagaggatttgaagatcatagagcacaagagaaaacatagtgcctttacatttaacttcgcgtgtgtgtgtgtgtgtgctcataaatgacttaattttaaagctaaagattatttagtattctatagattaagatgaatcattatttgaggcaaagaaagttattatcttattaatatatggtccagagtcagctaaagtcagatactatggaagtgggttgacatgtgcctgggtcatcctaagaaggaaataaaatcagtactttagctcagtccattgtatcacttagccttaacatttgcaaatgattttgaaaccttgctatatttagctcttcttaattataattgacaattggtggtggctatataatttttaataaatgcatagtaacaatgtcttatttagtaggagtatctcttaggttctcatgaatatgtgacggggactgccttaccttcaggactataccatcgatctcactgggccccattaccttgtggcaatgacctgaggtttgacaaaattgtaagaaccagcctcagtaacagtgtttctcaaagtgtgagtattgcctgccttggaatcaactggggtgctgattagaatgaagattcctgactccaccccatacctactccattggaaactgattgtgagacccaggaatctgctttttaaataagctccctaaagtgatccttaggtgcctaatgtatgaaaaacattctcagaacttgccttaaattaatttttttaaaaatgaatgtactttatactcctccatctctctcatatttctttccacatcacatactttatcaatatctcaaattaaacacataagaaagcactgaaataattttattcattcaagatcttaaagtccagaactacctaagatatcctcagttcagctcttctgtagttctgctcttaatctattatttgaatcatctaaagataatgaagtcattttaagctatagtcatttgataagcaaataattgtaaagtttgttaaaacagctcacattcttcagctatgcttcttgtttcagcagataacctgcaggcatcattgatgaaattaaaattagggtgaatcatgagcaggaaaagatattacttcagaagattataaggtcaatcacgagcaaaaatatatatatttcagttcctttatatgttcaatttacttagatatttgtttatttttccctgtttgtggtaatccctagtttttgcattttcttgtaactagttcattcctgtaaatgaagagtttctaattcaggaactgcttctttttgcatacattaatttgtaaaatttttttccacatagaatttgtctaccaaataatgtattttactgttccttagtatgcatttttgaaatgtacttattatcattgtatcaaatacaatctcatttacccagagcatttaaataggagtcactgttaagaatgtgtgacctgaaagataataattctaataatagaatgctcaaaacacccagtaatgttctattttgtgcatcaaagcaaaatattgggcaaatggtactggacttccagatcaaagatatttctaatttaaagtcattagtggatggacaaaagagcttcagctttagaaaacttattcttaggacaaatgcaaaattgaatcccagataaaagaatacacaagataggcagtataaataaacaccagcgtgatagactgaataccagcattaacaatgtggtcattggaatgtggaagggagtaggtaatttttaacaaatgtagaccaactatctcaccaaatatataacatacgagacaagaagactggtatatatatacatatatatgtatatgtatatatatcttcttgtctcatatatatatgatatatatatgtcttcttgtcccatatatgtatatacacatatatatatacacatatatatacatatatacatatatatacacacacacacatatatatatctcctataggcattcgatgaagatgttcttttttctgtaaagcatatacttaaaaactttgataaactgtgatttgtttaatatattcacgtttagagtatctttctctgatgcccaaatccaagctgtactattcttgtcctcatttaagagtatcttactcttctttttaaatgtgcagacatcttattatttactacaagcaatttgcatgtataagattacattacaaatacattattataagcttacattacattgtatacattatacatataatgtataaatattttttgtataagaagcaatctaacaattacttacacaattttaatgctttcataagattcttgtactaaatttggagaaatggagaaatctgaatattttatctatctcagtcagagtttaaaaaatgaatggtacagtgacctaatactttgagctcaaattaaattcaaggtttgctataaaattttttgcattttagcccagaggacatttaaccactttcaattaactacacatattttctcttctatagtacatactatgataatgatattacagtgattttatgcaataaaaatgtgattacaaattttaacaaattactctgagcctaaattttcctagtgtctatcattaatatgattctctcaccagcatcctgccacatgcctagtttgatactgaagattgacagcactaagggagaacttactgttataacaaactaggagaaagaaagatcaagcttttgggaacatgtatgtaaaattttctacaattattaatgctctaaataggaatagaattaaaacttgtttttcatgaagatttgtaatataagcaaatgacctactactgtcactctgtcaatttattacacatcaataacttccataaatttcctggttacatcaagctttgagtcatctacatgggctggtagatgacctcaccaactggttgggtttaggattttacttcttcagaatctactttacaaactaaagtgggtaggaacaaaccctttttgacttcacttccaaatgtttctggagctacacttcttaatctccttcctcctttcctgtctcagaggaacagaagtccttcctcctcatcagttctaacttccatctgcagttttgatcccatggcttcccacctcctctggactgatttccatcatttatttatttatttatttagctgtgtttttcttctccattgagtctccttttatgtacaaatatcctcctgtgttctccatttaaaacaaatttaaaaattaaaagtaggccaggtgcagtggctcacacctgtaacacctcccagcactttgggaggccaaaggcaggaaaattgcttgagcttaggcatttgtgaccagctggggaaacatagtaagatcctgtctctacaaaagaaaaaaaaaatacctggttatgcatgcttgtagtcccagctacttggaagactgaagtgggaggatcacctgagcctgggaagtcgaggctgcagtgagtcgagattgtgccactgcactccagcctgggtaacacagagagaccccatctcaaaaaaatagcaataaaaaaaaccataaaaaatgtaaaaagtgaaaattgaaaaagcaaataacaataaaaaatattttccattttatcctctatttctcattttctttactgcaaaacctttagaaaagcttgtctgttctttgcctagcccttcccttggcctaactctcactccctcaaccctcagcagtcaggtactcatgaaactattttcacactagtgccttccttattgcctaatcaaatggtctcttgacgctcttgctaactcctctttgtttgacacgactgaacatgcctctcctaataagactttgttcggcctggccatctcctacctctcattccttccccagcatcttggctgactccttagtgctgccttccctttatgcagggctctatcctggctgccttctcaccacgttctatgtgttatccctgggcagttttgtctactccaaagtagtagcacccacacacttctgactcccaaatctgtatcctatggccatacttctctccagagatcttgtttaatctatgtatccacctacttaacatcccaacttgaaaagccatagactcctgaaactcaacatgtccgagagtgaactcatttgttcctcctgtaaaacctgctttttctcctaccttccccattcctatgaagggtttcactctttgcccagagtcatccctggttccattttattcttcttcccacttctgccaccaccactacatccagttggtcaccaaaaatatctttaacttttttacgtgctcctccatcttgttttccattaccttaatctggccccttttcatcttttccctggactactaagtgaccttttaattggtctctgctccacagttgctttggatcacatcattccccttcttgaatgtccctcatggctattgattacctacagaataaagtctgagctccccacatggcacaggaggcccttcacaacccgggccccacaagctcccagtgtggatttgacctctacccgtagagaggtataagtcctatattctagttgagctggactatttaaatctcatctttgttcatgctgcttcctttgcctgccctcttggtacccacatgcctacccctgtagatctaacaaactctgactcctcatggtactgcttaggagctactcattctctcacattccctaccccaagtagatgaatttctcacctttagtgcatgatccttttccaacacatcacacagaattatgaaagtttattgaggtctgtttcctccttaccaggctctgtgttctattagggaggggactgcatttcattcattgctgtgttttggaatgtccacatggaacttgagactaaatgttcaataaatacctgttgaagtggattcaagcctagaattctcccatccccatttacagaatttcctactgccctacggctctttgtcaccttttccaaatttacatgagagttataggcaatgaagagattgctttatgtattctagaagaaaaatatacatagccatcatttcttgagttcttactaagtgctgcttttgtaatacatacatattaattcatttaatccttataacaaccttatgaggtaggcttcatctttatcatcatcctcaccttagagaggaggtaactgagacagagtagttaagtaacttgccaaaggtcacaaagctaggaagtagaagagccaggatttgaatccaggcaagttagctacagagtagacattcttaaccatcatcccacactttttccatttgtagtgtgctgtcccagcctacccttttgtcttccttatttggtagcaacaacacatgtgttttcaggaacagataaatttatgtcagtacgtttaaatctatttggctatgtaaatatgggaatgttttattgatataatttttatacataatttgtaattttaaaatagttaaataaaatatgtattgcttttgactttctcaaagaagtgtagaagttttgagtcaaaagggactttgaattggagagatgactacttacccaaggtaataaatgtaaattttaaataggaataattatggaatataagccaagagagttaaaattcttaactaatccaaataagtgtaacttacaatataactgttagataaaattgtaagcaaaaactttattgaatgcccactgtgaactcagaacacattcttatgaatatgttgccttactcaaggaagatccatttctagataatattgctaaaatgagttatataaagtcacatttttggtaaagcacataattaaaatagcttcttgacaattaatctttcttttgtaatatcagtaattactctttattcttcttgaatttggttttctgaaaaaagaataaacctctgctagacattttacattggaggattcataaacgagtagagagaaatcttcaagatttctataatttcacctataaagcaaaatacttggttaaattataattaagcaccacgtactttttttaaaaaagatgaaaaatagaagaattgttatttggaaaccaaatggtgcagccctaaaagacatacaagaaaatccagtccctttcaaaagaaataaaaacaaatgtaagaggagacataatttaaggaaacagaaagagagtttggactttgtcatcttatactggacttggcagtgagatgtgagaatgaccatctacagctatcactagattgaattccaggaaggttcagaagctgaattgacgatgagagtcaccagcaggggagtaatggatagtatctattgctttttctgtgatgagtggaccagggcacaaagagttcaactgatttgcttagaatcatgaagtaggttgtgccaatattctgggtgacacaggactaaaaggaggaaatctaataacaatctagaggatttctaagtctggctaaacctttggacctggttccagggccatcctctacagacccctctataggtaaggacctgctgagtgtggcctggcaccctgaggttcacagcattattggtttggttacttgctcttctgcaggaggcaggtcacagttggataaaactcatgatctaagagaccccaggtcactctccctgctgattgtgaccctgatttcctaggttctaaggtattcagggatgatttttgagatgccatttggcctctgacaattagacccatcataataatatctgatatggtttggctgtgtccccacccaaatctaatcttgaattcccaagtgttgtgggagggacacagtgggaggtaattgaatcatgggggcaagtcgttcccatgttgttcttgtgatagtgaataagtctcacgagatctgatggttttaaaaacaggagttctgctgcacaagttctctgtctttgcctgctgtcattcatgtaagacatgacttgctcctccttgccttccaccatgattgtgaggcttccccagatatgtggaactgtaagtccaattaaatctcttcctttgtaaattgcctagtcttgggtatgtctttatcaaacatgcgaaaacggactaatacaatgtccttagaggatatcacagaaaaaaactagagccctcccttccggattccaacaccctagaattaaatgagataaaagaatgacagatgcaaaagaacaagtgtaatgtatgttacaacatgaaataattatgaccaaagggcaaatattctagattattctttttgaaagttaaactaggtgaactttaaaaatgcctgtgatttctggtttaaactgctatgtagattaaaaactttataggtttttaatttatctttaaagaaaaaggttgggttggcactgtggctcacgcctgtaatcccagcacttttggaggccgaggcaggcggatcacaaggtcaagagattgaggccatcctggccaacatggtgaaaccctgtctctactaaaaatacgaaaattagctgggcatggtggcgtatgcctgtagtcccagctacacgggaagctgaggcaggagaattgcttgaacccagaaggcagatgttgcagtgagccgagatcatgccactgccctccagcctggtggcagagtgagactccatcaaaaaaaaaaaagaaagaaagaaaaggttactgaattttaaaaaattaatcctatgtgatccaatttcagttccactcacattctttatgagtaaagtctggatgttaataaaatgaaagtaattctacgtaatctgacttaaaggcaagtcactgtagagggaaaccaggataaaaataagtgtacttaagtcaagtgtgtagtttgtacctacagaggcaaacacaggcagcttggttcttaagagagctgcccacttggagttctcccaattaagaagttggagacaaaaatccatttttttttctatagttgtatgagacttttaggtatgaatcagcttcagttgaactacattgaatttttagcatggtgtgagataagagtatatttataacactgtaggatgactatagttaataatattatgtagtttcaaatagctagaaggaggatgttgagtgttctcaacacaaataaatgataaatgtttgagatgatggatatgctaattaccctgatctgatcactatgcatgatatgtatcaaaacatcactatgtaccccatgatactgtacaattgttactttgaactaaaaaatttttaaacatttgaaaaagtaaatgtaactacaaaagaccagaatggtacactgacctttcagattaactttagatattagacattgtattttcaaaaaacatatcaacaataagtattgctacaaatcattgatgagatagtgtgcctatgtcacttaaaatttctctgcaattgaagatacattattaaaggagccattgattttcaacaccaattgctgccaaactcctgctcaatctcttcttgttttgctatggaattactcctttactgcagtatgaatgacttcttttttccttttaaaacagttattatggatcctattaggttttctaagtactagacagtgattgatcttctttttcttataattactcccctgaaaattgactagcagttaagacactctgaagggcctgagtaatttgatttttgtaggcccggtgctccatgaacccttggaggggtttagagagcatctcattccagtctagcacaggcaggacactatacacatgagggctctgaggcctcaagagggtcagcaatctcacagagcatcagatatgagtatttaaagcaaagcatgacattaaaagttatttgtcttcatgtctctaaaatgtctacctatttaggatttttgaaatataatagcaacattcattgctgctgtggtagttggtagtactgatgcttctcaatgctggtctgtttgatgatagcaatacccaatttctcagtacatttcctatatgaatacagtggcactgcagctttcttctgaatttctgaatacgtagccaaaggctatagtcatatttccttttgttaacaatcctgggtcatccaatattcatatctattattgtctcataataataaattaggatctaaagcaaacaagattaacttataaagtagctgctatatttcttccaagtgactcagaagtaacatgccttgctgtttattgtttctatttaaaagtggaatatgctttatgttttgtgggcatatcaaatgttttactcatttcttgatatcattttatcatttctgaaatagacatttggggtgttttctgctttgtgagaggcatttttgaacaaatgccaggttttagtctttgtttttatgattataaaccacttcattggtgaacagccagaggagctgagctctcagaaagctcccaaatctcctgagtgtgagtctctgtgtgctggctgcatactgactgtgtccattttactcaactccaaaacacttgcctgcttcctgctcacccctgtggctctgtgccagtcctcagaacgtgtttgtgagtaaaggtatgtcctttgtctacactgcattcttggatgactgtgctgtcaaacgagaaatggaaaagcccctctgccttactttgtttctctgaataatacaaatattgcagatgatgcatcacattatgaattttcatagaatactgcaatgtatttgattctgtttaattctcaaaatagccctctggatattatttccattttagaaagacggaattgaggctcagaggtggcaagtgacttgtctgagattattttgttgtaaatggcacttccaggcccttaactcaggatttctgcctttctgcctcctacctctgcatcacagctgcctcaacctgttgttaattttatattaagctgtattaattggggctaggagtcttcataatgctaaatgtaaattctttgttttgttcaatgttcttattttatggttggcaaacaaaaacaacaaaacagcattgacaacaacaacagaaacaaccaactgaagctgcagcttttaatctttctaaagacaataggctaaagtgaggtcctcataataagatgctagtcaccaggaaggaagccagggaaaatctcctcccagggggtaattgatccctattggcctaacactgcatgtagcactgagttaggaggctccatggagaagtgtctgcttcttttcctctgctgtcagaacaaagttcacaaacaactttgttttccccacacctttggagttagctagttagggcccctatttatgtccaggggaccagacctggacatttgtaaaagaactgaatatagatggatagctaagaaaaaaacaaatgttaagattatcattatttatagcccaatgatttagtaatctaaaaaaatccaagaacaacaaaataatccctaagaaggacaagaattttaaaacatgcagtttagaaaaccaaatttctcaggcctagagctcaagtaaaagaaaatctgagataatgaagtctggaacactgggcctgcattctgctcctgactctgtgcccttgggtaagacattgaacttccccaccccagattcatcctacaccctaaggagggtgtaggattttgtagccttcctagtgatggcatactattaatcagaaccttaaccagctctattctcactatcccagtaaaatgatgttaaaaattagacctcgtgacatgagagaagaggggaaattaattacagattacaaagaaattgtgggatctaagtttagggtgaggtgttttattgaacctctagggttggtcatagcacctgccatatagcaggtattcaataaatgatgtgtaatgggtggttagactgatggaaaggcaggccttcccagtgacggtaaaggacctggggcaaaagagacctgtggttgagtcctgatccccacacattagcacactgactagacgaagttataagcttcaatttcttcctgtgtaaaatggagataatacctcatagggttatgaggattaaataagaaaatgcttagttcagtgcctaatacacaggaagcacaccgtaaatattagttattattattactaatactgtgatcatatcttccatccaaagacttctctgaggagcagggggcatccagagataaaaagcctgcaggtgggaaatctgttagccttctagggcgttaggtttctgtggaactctgcacctcttccctgtcctagttcttaagaacagaaactctccagggacctctggtgaggtagccgtgggaagatgaggtgcagaagtaagctgggacctgtgagcctcaatttcggcctcttctgcgctgagacccaagcggatcttgcttggcctgtatgcgttactgggggaaatggacgtgggcctgagcgcggcaggtgcgagggcgctgccccggggccgaccaccctgcggggacactgtagctgtcattccttcttctgcaggcgggtaggggaagcggtggccaaagtgggagtcgaccgctcagcacagtctgtctgagtgttgaccaggaaagtccaggctctttctaaatctcgccgccagacctggtgacgcattcgcatgtatttaaggcgtttgcacgcagaacgttatcacagaatgtagccacctttcttaacggtccgggaaaccagaggtctctccagctactcagggtagaggaatttctcctatctccatgtgacatcttctgatttagaagaactaatgttagatttctcttgggcctttccacctacagctatagtcttccctttgtttagctaaaattgaggcaggtaggaaaatattattgggggcataagcctattagtgtgtaaacgtatttttatgaagtgtgcctccagggagccattaaaaactgacctctcaaccacagaaatagatgagattttgagaacattgagaagctgccttttgcaaagtaaatttgcaatggtccttgacgaaggggggtcgggggcggggagaagtccagccgagagaggagctcattccacgctatatttttgcagttgaaaagctgcctaatcatcgctaaccgcttcccgcataagagttctgggaagacttcagaaacaaggcaaatgaagacttttcactgcctccttcgggctgtcgcttccggaagccgaagtcctagcacgcagagcagcaggagagggttactttcaggcaattccactgagcaaaataaatcacttaatggcataacgttctggcttaaaaaattggaatttatcagaggcaaaaatatccttcaagaaactatggacactccgcgccctattcatttccatggcagcagagtatctgcatcttgagccacctatacagattcatgcctcgtatcgctctcacctcctttctttttgaagtaaagccctttcccaagaaggcggccagaaagtggaccccaccgggggaaaaagaaaaatgaaacgcaaatcagcttggcactgcttgcgtcttccaaaacgcggtgggacaaggctattgagtctatagctaattctttcatgtatataaaatgtatacatatgtatatatttttatatacataaaagaattcatatatatgtatatagctatgtggagccctgaagcaattctccatgcttttgtctccctcaagttccccaggtggaggcagtcataagcattataagccgccttagtgaccaccagggacggaaaccgttaattatcacgtttcctttcatctccaggggccctttggcccgtgacacaagaggcttcggtattggcgctttcccagaactggcccagaggagccagttcagagtgtgaggtcgggtctgcattgaacgtacacaccgaggtctatcagactcccccgattttagcgaagggtgctgactgctgtgctgctagaggctagcaagctccctgtgcgcagctgatgagtttcagcaactcgccacctgggcgcttttctttaaattttgggagtaaactgggaaaataaaaaaatctccacgtccactggctctctccccttctccaacttcctctttcgactcgtttgtgggagttttctcctctttgctgggactataatgtgatgcgcaatcgtttgtgaatgaacaaaagtcaccggcaagcagggagacggggacagatcgctgacggcagattgagggtggcagcaaaggcccggcctccaaggataatggggagccgttttccctcacgcctggtctctatggcccccttcgtcttccaggtaaaatgaatgttccttcatccatcatccgcagagtaccctcaggcgtgcgtagaatctgctgatgaaacctattagcgccgactgggcagctttgtggagccacccgaggctctccattgtggcctttgtctgcagaatttaagcatttacataatgcattagcacggaactcagcacccggtggggacatcgcgtgccaagcctggcgcggccaacgcttcagcggctccctcacccggcagctccctaggaccaccctcgaggaggcattggagtcgggctgcaggcgcacgggcaaagaacttagcatctcatccaagtacttcgccttccttggccgtctccgggaggttatgcttaaaaacataaaaataaaaataaaaataaaaataaagggaggcggacaaagtttcggtgggtgaactgaagctgggtccatgtgaccctgaagccggagaaataaacttaacatgaatcttgctttcctggcgggcgttgggaccccgccgtttttcatgccaaccgttggaagcttcgtactcaacggccacaggtgcctaggagcgcagagaggcctcgggttcaaatcaccggcgcgcagggactggactcgcgggtagcgacccccccaacccccccccccccgccctacacacacaccctcgcgccggctgaaagcatggaggattcagggcatttgaaaaaagaggggctgggcgcggtggctcacgcctgtaatcccagcggtttgggaggtccagaagggcggatcacttgaggtcaggagttcgagaccagcctggccaacaccagcctggccaacatggtgagaccccgtgtctactaaaaatacaaaaattagccaggcgtggtgcctgtaatatcagctacttgggaggctgaggcacgagaatcgcttgaacctgggaggcggaggttgcagtgagcccagatcgcgccaccgccctcctgctctgggtgatagagcaaggcactgtctcaaaacaaaacaaaacaaaacgaaagattcggtcaggaaagaatctgcaggcattcgaggcgctcgcactttgcaaagtaaatgcaatctctttattaagccgaagtccctcatatctatccttttagaggaaggtggtccaactcagaaatctctcccaagaggactttccaccgaagactaccgcgaagtgccaggaactcgccccagtcccgacaggtgcaggacctttcgtgccgccacaccttgggactctacctccctaaataggccacttaaaagccagtagtgcaaccgggatcccgcggcgataaagaatcactgtgcagaaccctggagctgggagtcggcccgcccccctcccaaagaaaccgggatcccgcgtcctccccgccgctagcgcagcgcgccagcggcgcccaatcagtgagctttccgggtctgtgacggccttcggctccgccccctcgacggccataaaaagtcgcagcgaagcctgcacctccgagcaccgcgcgcggccctgcccccggcacggcccccaggtgcgctccttctccggctgcttgtagcactggtctcactgtccccgccgtcagccaccggttccttatccgtctcattccccattgtggcttggctgagccggtcgccaggcctcgctgtcctcctttgccttcctctctcctcagcggccgtactttgcgccgtacctcacctggcctgcaggtgagcagcagcgcagcacccctgcccggcgagcttaacttgcccagcccggcccctgccggagtggcaccggcacctctccaagacgccctcttccctgcaggatgaagaaccccatgctggaggtggtgtctttactactggagaagctgctcctcatctccaacttcacgctctttagttcgggcgccgcgggcgaagacaaagggaggaacagtttttatgaaaccagctctttccaccgaggcgacgtgctggaggtgccccggacccacctgacccactatggcatctacctaggagacaaccgtgttgcccacatgatgcccgacatcctgttggccctgacagacgacatggggcgcacgcagaaggtggtctccaacaagcgtctcatcctgggcgttattgtcaaagtggccagcatccgcgtggacacagtggaggacttcgcctacggagctaacatcctggtcaatcacctggacgagtccctccagaaaaaggcactgctcaacgaggaggtggcgcggagggctgaaaagctgctgggctttaccccctacagcctgctgtggaacaactgcgagcacttcgtgacctactgcagatatggcaccccgatcagtccccagtccgacaaggtatgatgtgtgactcccaggggaagtgggctccgcggagatgccccctcccatccctgaccttttctcttccccgcgagtagggatctaattcctggacacctcccctaccacttccataccatcctttttctttttccttttttttttttttttttttttttttttttgagacggagtctcgctctgttgctcaggctggagtgcagtggcgcgatctccactcactgcaaactccgcctccagagttcacgccattctcctgcctcagcctcctgagtagctgggactacaggcacccgccaccacgcccggctaatttatttttgtatttttagtagagatggggtttcaccgtattagcaaggatggtcccgatctcctgacctcgtgatcctcccgcctcagcatcccaaagtgctgggattacaggcgtgagccaccgtgcccggccttccataacattcttaaagttctagattaagtaaggaaagttctggtgttcctaaggtaggctaagtaaataagcaaatggcaacgtgccttgcaggatatctcgaaatgcttagagaaaggatgtggcaatgcaggaccgcttccagagattccagagctgcccagtattgctgcagaagtcatcaggtgtccacccacagtgtagttcaaacgacaaagggcaagtgactgggggtgggggatacaaggaatcagtcaccgctgcttgcaactttaaccaagaatttcacttgaaaggaagaggtccagagtttatatttaatccataacactataaacaaagtgtgtgcctttaaaataaggaaccatgcagttttctccctttgaaagctgcatagagggatttttcattgcttgctataagctatcaaaattcccagtaagagggcccccctggtagttcccttattctttgtgttggtgcttcagagttgtattttccatggtattctgaattctttctgggttggctttgatcctcatctagacttcattgttaagcatcctttacccattagccctgaaggtagattacattgtttatgggttccccagagatcaatacaattagttttcaagaagagatgttaaacattggaaggtaatttttatgagtattttgaaaaaatactcatgattattaaattagccacaaatccaaagggaaaaatggatttttatttccttttaaaacctcttaacttttaaaaatagttaagattttaagcctgaaacttcacttacaattggaaactttctcagccttcattgcacttgttaaagaagtcattgttaatgttcagtctttataatggaaacctgggcaataacatatgagctttagtgttactcttcatgtttagatatttttgggaccagaaaaagctaagtcagtttttttcatgtaaccagtttttaattgctccacatcttggttaatttttttgacccatttgggaacatctttctctatcctctgtgggagagcatggaagtattttgcttttatagatcggtgtatgaaactccttatagattttatagagccacaaaagactcaatctaggaattcttttccaagtaaaataaaaatacagttagagcactgtgcagcgattcaagaatcacagctctagtccaggcctgtttagaaatgaactccaccacatttacaaacacgggctcccaaagtgtacaaaaggaaacatgtcagatttacttaggaaccaagcaaatcatttctctaaggaaaaacagtatttctatcaggtaattaggagttaccctttcatggaacacatatagcgctgcattatatatttctacagaaaaacagtaactagtgcttttgtaaggtagtaaaatatttaatctgcataaataactagttggagtagtttttcatctttggaaactttgttagggtctacagaagtagagaagtgttttaattgctgttgctgcatagcacctcttgtgaaactgagttttgtcttcactttgaatggtctaacaaacaatttggccacagagtagatttcccgggggaaaaaaaaaagttttcatcccaaatttcctaattctacaaactgtttttgaacatgcactgagagaagtaggtcattaatactgaaggaaggactggtttctactttttagaaacataagaaattatttgattctgggtctgattgctgagttctccatatatgcaactaatattaacatgagagttacaaagttgcctcttacttaaatttgagttaataaaaactctcaagaacacactacccctaaggaaaacactgcaattagtttgcaaatgaatgaactggaaaagaacatttactcctttgtggtaacactctattttacaagtttagaagtcataaaataatgggatttttataatactgttgacaatcagtattttgtaaactaaaaattcctttggttaataactattactattccttatgctttttctactatgatttttttttactttgttaatactgctctttcattgccaaaaatgattgcaaatgccccttttaatttgtgtggattgagtgctcacaagagtgttcctacagacttattgaccccttctagaaatttcctactgttgagcaccactaaagatgcctgctggtctgctgaccaagtgaacaggaacagggtattagacatgagttgctttttgagaaaaatctgcttttgtgggaaatacagtcgaaaatgattctgattgacttaattataaattaccaaggaaaaaaataaggataactgtatttacaacttagtcatttacaaaaatatgtcttccatcaacctccttttctccttgtcctgaaaacttcaatttgatctttaccatcttaaaatagtatacttctcaatgccttgctagtttattaaaaaaggacaaatagtatgtctgatagaaaaataggccaacatctagataagtttcacacttgtttaggtaattgtgtaaaagtatggatagagataaccatactgtcaaagtggtgtattaaaacatattgaacttgttcattctatcacttaataatttggaaacctagctgcccagtaccatgtaagccactgtagaaaaccctaaaagaacataaaatgccatgtctagaaacagagcttaaaattagtatgaatagcaaaacccatatagaaatgactgacaatcactgcattctggcatcaacggcaatatggtagagataactgtcaacaaatagagtactaataataatcactgtaataccttatgtttatacagcacgtagaagaatacagaggacttgtgcatcaaacatctcagttaatcctcagaacaatttgagtgttcccatttgactacttgaggtgacatagccaataagagctggagccaggactcagacataggccatcatttctaagtaaaattatttttctaaggaaaacattacacatattagaaggatgcattcctcaggggtaaggacaatatttgtctttttttccagcagccagttatgtgtcacataattgatcctgaatttagcatatttagtcaggaaatgggatttgacaataaaattagactttctatgcctgtagattttgagacttataaaaaagttatcattggtatcattagattttagaatggcagattggaggaattgaatctacttttaattggccaaattctattatttttactcaagattagagacacctctttgctcatctaattttaaaatatgctattgttattgataagcagtttgatgttttaaacctttagtcctgaataaccatgtggttatactttctatagttttctataaatgctgtatttacataggcaactgccattattagttgcctaagggatcatttctgctactatacggtatagaatcagaactggactcttaacattgtaaatttttttgtaagtcataagaaaaagtctagttcttctggtagacagaaaatagctgggaaaactgatttactgtttgatatatgtgattcttcttgggtttagccacctttcctaattttccaatattttattttccagttttgtgagactgtgaagataattattcgtgatcagagaagtgttcttgcttcagcagtcttgggattggcgtctatagtctgtacgggcttggtatcatacactacccttcctgcaatttttattccattcttcctatggatggctggctaacttcatacccccatgtcagtgtgtgtattctgtatgtaaatatgtttatatttatagagcatcaatcaatataagcattattgagaaaaatgtgacccgtaacactgtgttctggataaaaatgtgattaggaatcacgcaaagtgcttactgtgtaagcccaagaacaaaggctttctgaatcttctcaggcagttcagatttaaagcaccatccaaaccttggaaatacgacagggtgtggtagaattcagcaatatgagaaaaccagcccctaaaatgatagccacaagagattaattgtgtttttttttctcctgtaatccttgtactgttcggctgaatttgaagattggaagacttatattgagaccagtaactttactgtaaatttactttgtttcattgaaaaaacaaattgataaacatattaaactggaagaattttctttattcaaatgaaaacatgtttgatgactggtcaaaaaataagctcataatctatttttttcatgtagtatataagtcaagaatgttttattgtcattatgtgaaaccaatattggcaaatagtactttaatgatgaagtaaatgaccagaaattatagaaatctgtgttttcctgtaaaaatagcactatagtatcacttgaacaatttgatttggctttacttactaggaagcctggaattcattatttttttccttttatgtgccactgtggctactttaaatcactctgagaggtaaatggatataggattgaagttatgtgggtatttggcatgtgtgtgtgaaataaatatgtagatagtcacatatacacagactgagagataaattgttcttgattgctttattatcatcatactagtgtgttcattatagagtatctgtagaggtgaatgtaaaagtaagtccaatctattttcttatgtcattgaatttgtagtgttaacttgcatatatgttattggatgggttgtcttttaaagcatttactaatgtactctgaaatttttaaaagccttcagatttgttttctagtcacttttttccatatcatttctaattatagtttatatccttaaaagaaggatgccacagtagtatgtaaaacccaaacaagtagaacccaagcaaataaaattatttaaaataattttaaagtggcttagtactgccagtcatgtaaattgattctgctgagggtcttataagaattgagatataacaatggtaaaacaagcattcaagcacttttacaaaattaccaaattcttaaaatgaagccacagctagacttgcatttcaggtattaaaattgctttcttaactgtcaagaatcacaaaataacaaatcatattatgagtgaatatggggagggcggggccaatcagtcaatgataatctgaacaaattttaagagcagattttagattaataatgttttatcaccactaatttgcccacaacaaactcagtatttaatttttcaaattaaatattaaattatttaagtattttaaataattaaaacattaaatggcaacaccatagaatataggtgttctctggacctattctaaccacttaaaattatcttaagtatgcatacataaaagcaaccactatgagaactaccgtgttagtggtttttcacttactgtatattacccttgtaggaatagtttaaggaaattcatttcttaaaaatatagtgtcctcaaataattaatttttttgcaaactttagttattacaggcagcaaaaaccactgtctgaaactaaatctgtgttcaaagatgaagacccctcattaaaagccaaggacgttcttaagattggaactgacataattagtcttgacttacttcattaaagcaagattcaattccttgttcatttgagtgttcattatatgccaggcattgaccagttgcaattttatggtccagaattaatattattattcgtaaactagctataatagagtatatacagtgctgtgggaatacaggggaagaagcaattaaatctgctagaagggtaagagaaatctgtatgcaggaggcaatgctagcattaagccaagaaatagtgtgaggtgatcttatcacactgatgtgttcaactgtttatgggaaaaggaaactaggatggttttatttgtgaaatgttctacaacgctagaactgttgaacttcttgggagaaaaggagaatctttgttttgttgtgctgagtttgattagttgcttaaccaagtagaaagaaaagcacatcttcctgatcacagttataaaagaaaccctgaggccgggcgcggtggctcaagcctgtaaccccagcactttgggaggccaaggagggaggatcacaaggtcaggagatcgagaccatcctggctaacacggtgaaaccccatctctactaaaaatacaaaattagctgggcgtggtggccggcgcctgtagtcccagctactcatgaggttgaggcaggagaatggcgtgaaccgaggaggcggagcttgcagtgagtggaaattgcgccactgcactccagcctgggcaacaaagtgagactccatctcaaaaaaaaaaaaaaaaaaaaaaaaaaaaaaagaagaagaaaccctgagccattaatgtgtctcgtaacttgaggaagttcatgaattctctgggcttcatccattaagattcatccttatgctcctgcaagtttcttatatttatgtatttctattctgatttctgaaatgataacctagtagtgtctgatgaagttttttcatgcttattttattctttgtcacagatgaaagaagaataggactaattggggctaagatgaattaatgtaagtgtcagatactaggcaggtgttagggatgaaatgatgaatgaggcatggacctgttcctcagagtttatggcccagtagacataattgtattaggactttctgcagttgacatttgcataaagctgactgactgaaggaacagaaagtgagacagacagatatgaccaaatttatacaaaccatgtaccaacacttgaaagatgggtggatattttccaggaaacagattttgggcaggacattccatgcactggaaatagcatgaacaaatgcatgaaaattgcctacaacatgcctggcacatagctgtgaggtaccctatgagttgttgacttgaaaacatggaactgcacagggcattcaggcaagtgcaagtggttcaggggccagcgcagagcagagtgctgagtaaagatgtcagaaaaggaaagcaatggtctggtacaagtcttgtatagaacaagaagtttagacttttgaacaggcaatcgagatttggggttcagaaagataaatcccaaaagtatggagaacaaaggaactcattttaaaggactagctaagatgctcaatctctaaaaaaaaaaggatctgtattcgtgagagtagagagaaaggttgtttaggaagagtcaacagactttagcaaaatccttttatttgattcatgcataactcctgatggagtgtcaaggaagactcattcacttttctttcctgccagaaagttggttcttgcaaaatagattaacttgatgactatgtgtatattggatactcctaattttagctctgttagatatgtttctttctaaggacaagcaactatgtatagacttgttgtttgaattttttttcagtatatatatgtttcttgtttttctatttttctacttcatactgttaatgtcaaatatcaaaaatgttttccagcaatatcaagttatggcaatggcaaaagtccttgttgtagatgagaagcatataagaaatggttgccaatctttgttttgtatgatctatttagagttttaaccaacctagatctgtcagctaagctaattttatatttggtatacatgcatgtcaaataaagttaattttacatactattctctctttaaattttaaatacataaatgtagatcacaaactttttttttcagcgtggtagcctgaagaattttgtctttccaatcttcctttacagattaccaaacttagttttatgcatttgaagttaaaactttatgtggatctgtcttcagactgataatatctatgttatccatatcttgaagcctaccttgattgtgtaggaataggttctgtgtaatattaaataacatatcccttctccattgcacaaaattaagtaacaatgacaacaaataattagtcataatatgaactctatacagttgacccttgggcaaaacaagttttgtttgtttttgtttttgagacagggtctctctttgtcttacaggctgcagtgtagggacacaatcctagctcactgtaatctcaaactcctggtctcaagcgttcctcctgcctcagcctcctaagtagctgggactacaggtgcatgccacaatgcccagctaattttcaatttttttgcagagatggagtcttgctatgttgcctgggctggtcttgaactcctggctttaattgaccctcccacctaagcctccaaaagcactaggattatgggtgtgagccaccaggcccagcgacaacatgggttttaactgggtgggtccatttacgtgcaaaatttttcaaccaaatgtggacagaaaaccaagtattcctaggatctgaaacctgcttatatagggagggccaacttctgtatatgtgggttccagttcctgcagggctgactgccagacttgactatgtgtggatttgggtgtacatgggggtcctgggccaaacctctgaagatatcgagggaacactgtaaccagatttatgggtgaggaggtgatgggatgtgagtagaagcaaattccagggccagtcttgaaatacattcatagcagtgccaaggaccatagaggttactgagcttgatgcttagccatccaacgatatttaaagatgtggaaaatcaggctcctaggggttgaggtgcttcagagaaagactcagaactttgctccagatttcattccattatacctccctgaggtataatggctccctgaggtctcccagggattagaaaaacttttctccaatgaatgtatttatttcttgcacacgttctatgtactttaagcaggatcacacaagaataaactggttagaatcttagtcctggaattgctcagactaatgtaaaagaatggcaagattttaaaataatggtaggcttgtacaagtgtcagaagagcagatatgaaacctttacctgtctgatggggaccaataaaggagaggggtgtcacgtcacagaagtcttcattaataccttaactgacctgtaaagaatatgaacacttaaggtgaaaaagacctcctttttccaggcctttcaggcacagggaggagcaactattacacaaagggatggagccaggagaacccatatcacagttgggttacaacagggcgttaagaacaatcacttgagattatattgttgctgtgagagaaaggtgccagtcctgccacaaagaactcaccattcctttggagaagaacaagtctgactcagataatgctgcagacaggaggcaagttcacggaggactttgcattgtgaaagtttggagaggaaagaaagcatttcccaaactttgcaactgggtcccgtgagtattaggaccatgtgattttctgaaacacatgaagaagaggtgtgcagttagtttgtgaggaaaagaaacacttttttttttttggatggggtttcatttaaggttacaaggagaagtggaaagtacagaaatcacttcagtgctcagcagatgaatagtcactgctccctgctcagctcacaactgttcctgcatcctcaaatgactctagtgatatcttcttctcgagtctggattctggtgctgctatttgctcccatttagcttatgatggctactcgcgtggcggcccacctactgccgctaactcacactgcaccattgtttctgctgccttgtggttttcattacacttctaccctgttacttttagcttctgctccactgtacctggtcgccgtctttcatttaaaattgcaaagggatctaaccaagctgaccagtcactatgcaatatttgtggtcacagtaaacagttctctagccaggctactgaatggaccattgattcccctgatggcctttaggtctggtaccttcagatcaggtgacatccttaggctaatcacttgttgccaaattgcacgaccatgtgttcccaggcatggagatctactcttattcttaaggagctactcataactgatatcacttggaggatggctgtctgctttagtttaaatgggagacctatatctaacgatcactttagagagcttattctgtagcaatatagagaatggattggacgagatgtaaattaaagaatatgaagtctattaccaagatgcagaagagaaatgatgaagactagatgaagtcagtgtgagtggagatggaggggagagaatggattgatttgaggggtgtgaaagatggagagtgtttcatatagggtccaaccaaggaaacaaaaaccattctaggtactgtctagtggtgtgtgtgcataagagataccgtggcttctcctttcctttcctcttaccctccaatctcctgtgaggacttcacattgggcagctaatgcagaaaccagctaacaggagagcctggaaaacagcctgctgagcaaggcaacaatgtatctgagggacaataggcagaggcaggcaccagattagtgtgactgattgtactgtggcatcatggctaatttagggaattttttaaaaatgaggcttgggagaagtatgaatctggttttggatctatgaagtctgagtatcccagggtctcacagttctcacaggtaggcaataggaaattggagtctcataagacagagttcagggataggaatgtatttgggagttattataacagtggtggttcaggccaaggatgtgagtgagctagaccatcctggggaagtttatgaagaacttttttttttttaagataaggatggaagactagggtcacaaacaaggggaaggaagaatgatccagaatagttccaggaggagactgcaaaataatggtacaaaaagttagagcagacctcatacaggagagattgtatgaggaagccaaggaggagtgagcttttgaaggtatgggtgtgaacagcatcaagatacagaaatgagataagaactgattagtgcctacattggatttggcaaaaaggagactgtgagtgaccttgattaataggcattccactaacttcaagtatgggggtgttagggatgttgcggttgcggggagaaggcagactgtgggttgagatttaaatggaaaatgactacgagcttctctttgtagcagtttggtgggagaagaaagaaacagataaagcccaaagactcagaaagcagtataacgtgatatctcttactacttccgcatgctttagaacaaaatgtaccgtgacctgttgcaagttaatttttgtaattattttctgagggacaaacactctttttttgtgacattatcacaattgcactttttttccaagactgattactatcagaggttcagtctaatcaatgagcattctcatttctactggcttctttgaaaagaacacatattcagattcagagtctaacaggctcagaggattgggaaagggtagaaattaaaactgcactgcatgggactctcgattcttgggctctcattcaaacaacctgttgaggaaagtccattaccattccttccctttcacggaatgatagaacagagagatcaagacacagtgcaagactcaaactttcggaaactttttgaccagcatgacctcataaacacttcagattctttataattaaattattcattgaaaaatagaattgaaggttaaataaatccaggtggctaacagagccaatgacaaccagacaaagtaatggtttcttatccctttgtcctatactaacccaattcacatagcatcttgagaccactttatctggcacttgactgaatcaccatccattgaagaagaatatgttagtattcccgaaaaaaccttcttgtttatgatgagccaaacaatgattccaaattcaaaaatttatcagataaacaacacttgtctgctaagcctggctcagcagcagctgcccccaagaatctgttcaggcataagctttatgttggtctagacacctgatctgaccaggtgtctcactgctgggtagaaacctaaaaggtagcaattgctacatgcttgatgaacatcaagatttatttcttctttaatccccccatgcccccaattctcttctttacacatcacatctccacacacatctttctctactttacctctgacaagtcacagacaaatgactgccagggaatttaaccatggtaaattatttcacactacatgcaatttttctggatgggaagttgaggtgacaataaactttatatttaaaaatataaaggcatttaaggaataattcaagatgggagaaaatctgaaaatgagattgaaggaagtggatttgcaccacctcagtatgtttgaggggcacctcctctgtgaagtgaagcagcaggcaaccagcagcgttcatctcactgctgcagcagcagctggtgcatcgccacagctcagccagatttctccactttgctagtgctcgtcctgaccaccctgcgagccagtgtaatggggattctccctcatcagatatttttgaggcaacgttctttttgcatttattctcaacacacctcagctgtgggatttctagtctcaaaatatggccctttgcttggttttcaaactcaaacttatccccgcaaaaggaagtccattcttcagtgtgtactagaaagtgggaatgaatggtgtagattagtggcagtctttttcttcttctaatagagcagaaatacaagtttcagtcactattttggggtactgtgtggtttcaatgggcatcactgaaataattgtcatcatggctttacctgagagttcggacatttaccctcttacagtgtaattaattacataaaatttgtcaacttgccagtttcccctttacattttattattattttatttttattttcttacttagagaaaaatgaatcaactttcattctcagaacttggtctttatttttttccaatgtaaaagaaaactttgtgctcatgttcctatcatgtctaggctcaggtgccttagctctcaaggacttcacctgctcttctggacttttccatgcaaggtgaacagatgcaacgtgcagagtgagcactctgcaagagaccagagcgtgaaagctttattaacatactgaaactatggaatgtcaccacaaacttgccaagctgatttatgatcaaagtgcagtgaaatggcaatcctatcttgtagttacgtgaccaacgctgaatatcattcataatagcacagaatgggatcacaagtttcttgaggagccatggatgcccaagtgtaggggagaatctttagataatgagcactcctgaactccagtaattatcagtcagaagtggacagccatggcaactgttggtgtgatcatctactgaatcagagatgacaacacattcagagctcccggatgatagagaggcttaggctagagccaatctaatcccttctgtttatatgcaagttagagacctataataacataggaaactccaggaaattttgtaacagaaccagagcaaaaatctgactttcctgacacttattccctgttctgctctggggattctatattgatgtattgtttgcaagctctccagcagatatgattcttattccacactggtatcattggtagcttatttggagagaaaaacttcaatcccaaagttattgtcccacctagacagcagggcagactcttagaaaagtagaaaagatcaatttttatcccttctgcccccttttttggattgcttgattcttttccttgccaggctctaataacttgtataaattttgcatggtatggaagatacctggtagaatcaaggagttcttccaagaacccagaggatctgtagggttccacatttgtagccttaagcattaactttttcctggcagggcaaggcagccagcttattcccatgacagagaattcagttccttcactcctttcattcagttcacatgtattcactgtccacaatatgctaggcattgaacttggtagtggggctacagaggtaaaggacaaaagtttctattctcatggaaaaggtatgttgtgaccacagagttacaattatctgagttgaaaacagcttcagaaaatatatagcattttaggatttattatttcataacacactttcacataagtttgctcatttaataactgtcacccccataaggcaaagaagaaactgagcctataaatatcaaatgacttagcttatcatatagccattttaaccaacaaggtaactgtgattctcattttacaaacaagaagactgaggctaaacacactaaatgttttattcaagatcctataatcagtgatgttatattaagactcatacctcagtattttcactcaaaattctgtaatatatcacatgccctatttgtagggaaactaagtaaatatagtcattactttctttccaagatcacagtgctacagttagccagtggccacctgacatgatgagaaggcaacacatttatttctaataaataaatgtgctttttgactataaagttcaacatgatataacacttcttaacttcttaaaatccttacctagggaagtagtatggaaagatatggcagtgcctgcccctggagcctgaaatttaagctgacacaattaatgcctggttctagttttgttaatgtatctgttatgggctgactatctgtgtatccgctaaattcatatactgaaatcctaacccctagtgtgatggtatttggaggtgggatctttgggaggtgattagagttggatgacatcatagggtggtgtcccatgatggtattagtgttcttagaagaagagagaccagagatctctctctctctctctctctctctccctgccatgtgaggacacagtgagaaggtggccatctgcaagccaggaaaatgacctccaccaggaatggaatctgccaacaccttggtcgtggacttctcagactccagaacaatgagaaataaatgtctgtcaagtcacccagtctatggtattttcttatagcagcttgagctaagacagtagccatgcaagttgcacccagttacaccacatacttttcatgttcagcagtccccaatgaggacagtatggtgtttatgagctgacagcattatgaacaatctatattccacagtgaactgttggcaaagcaacttccttttgtgaagcaacgtcacaacaggtattaagataaaacaaaagcctgtaatagtaagagatgtgtccctgtatcttgtttgttgttatacatacagatgcacacataggttcccaaactgggcatcttggtaattgggatttactctctaggtgtataaggaaaagttatttctgggcaacaaaatgtgcattccaaattacagtgctgaaactcacctggtccaatgctgagaagctgggatgcagtgatggcaaatggaccaccctggctctccacgagtgggcaatggtgcaatccttctcaaggcctccaggcctattgcaatgacagacctggttacaaatcaaaggatatcatttacatgtgtgacatacataatgttgattcagcagaaatctgtcttggccattttctaagagtggacaggccttaatcctcctatagttctccctcagagtctttagcacttataaaccaagccctagaatctttgctgatgttgttgagaagccaagagcgaggccactgtcaggtcagaatggtgaggtcctgaagaagaaattagcctaggagatgggaaatgtgttggaaggcaaagtggaagacaggcagggcaagtggttcatgacagtgcctgttggaaggccatgtggtccagtctattcttataaagacagtccttccagctccacatggcccctctaggcacttactaagtgccagcctgaacgtttgcagcagtgtgggaaaacaaagaccacaccaagtgtcctttgcagatgggggctcaattggtggatgcaggtccagcacccttcttttaccagggattctaaaatggaggatgggaggctgagcacaaaggctgattcttgtaatctcagctacttgggaggctgaggcaggaggatgacttgaggccaggagtttgagaccagcctgggcaacatagcaagacatggtctctaaaaaaattaaaaagttagccaggtgtggtggtgcacccctgtaatcccagttactcatgaggctgaggtgggaggatcacttcagcctgggaagtcaaggctgcagtaagctatgattatgccactgcactccagcctggatgacacaatgaaaccccgtcttatagatgatagataaaatgggcagtggagggaggcacagctcaagaggctgagccattccaaaacacctctatgctgaaagtttgaaattgatgagtttgccttgtttatagtttgtcttactccttaacaaaattatacacttttcaaaggagtttcttagtgtctagtagtcacagtgtacatagcactcataaattataaagcgtgaatagaatttcatgttctcccagagttattttattttttataaagttctacagacaggcaatcaaggtaaggaagatctttcatttctagctgctcaggagatttacgttcaaacatctaaccaaccattcttgttcttttttctgccttcctccctgcaacaagtttatactgagtacctgagcacaaagcaggtgctgtgcctgtttctgctctggtttggaagaagaaacaccaagtcttcctcacaatcagaatgcagagggtaggtctgtgtggtctctcaatcttacgcctgacagtattagtggtgatattattcaggctgcggcttacatgcatgcataaacctcacacttatctccatgcattgtaaatttcctatttaatcctttgcttatcttatcccaaagtttgaaatctctattcttaagattggctctgggtttaaggtacaaaggatttttcctttctgtcttcttaaatttcttctgttgcccagatgactatcatataaaaaaccattttgacgtgcaccaatatgaagtggatttgactggctctgagagcaccagttttccggggtgtttgccccactctctgcctgtgggaaccccatcaattcagcatgtgagcttttaggttggctacattacccatttccatcattactctcatcattaaaaatatatatagataaaataaattaaaaaacactactcctctcttggatgttcttctgtttgtgtaccatctaatttaatgggagactgtcagaataattttctcatttctagatttaatgggaatataactagtcaaactggaagttttgttattcagttctctaatttttctgtgttgtttcacaaatatgatcacatttatttgcagttcctcaccacaatttcatttttctctgatgagtctgttcagtcttcatggggaaatctctgtgataaaacaaaaaggcctgacatttttgtcttgctccattaaaatgatccccattgaaagttattacatccactgaaaattatctgttttaattttctctagtataaatggg

SEQ ID NO: 364 - DNA, 88217 bp, Homo sapiens
tgttggtgaggctggtctcgaactcccaacctcaggtgatccacccacctcggcctcccaaagtgctagggttacaggcgtgagccaccatgcccagccaattttcctcttcttataaggacactggtcattggattggagccccccaatccagtacgacatcatgttaacttgattacatttgcaaagaccctatttccaaggaagtcacactcccagatactgggagttaggacttgagcacatctttttgggatacacagttctactcactacatggggttaatttactttcactctttaatgaaagcattcaagaatatacatttacctttgaggatatcttaaaggttctgataaggatgttttcattttcctgctttctaagtagtgtgttgtattattattgcctctttgagccattaattatttacgagaatgatttaaaggctctaagtagcttgagattccttcaattattattattttgtttatttgctttttctttattcttttagttcacaaaaattcaataatatagaatacattaaaatgcaaaagtcatcccctaaccaatagtttctaaatagtggatttagaaactattggtttctaaatttctattgttattgataacttggagtctatctttgcaaaccattctttcatgtatacagaagtacttggcttagggacagtgggaggggggtaagggatgaggaattacctaatgataatggacattcttcaggtgatgattacactaagagcccagacttgatcaccactcaatacattcatgtcacaaaactgcacttgtacaccttcaatttattttaaaaaacaaaacaaaacaaaagaagtacttggctgaattatgtgcttcaaatactcatggagcgggagaagagcagatcccaagaagtgaatgcagtaaaaccaggaaaaaatggaagatagtcacatctaattttcctaaaccaaatttgctcctaacatgagtacaaattaacagcagatatattcacactttggtgaaaataaaaacttttctcctcaaagctctttggaatctgtttgcttaaatatcaaagtccatcaaacttttctacagatacaaacccaaactcagcttttaaaaattttaacctcagctgcatgagttacttatttaactggaggtagacctacccccaccctcaaacatttgtcctgctatgggttgtagttcgaaacatttattttcacttgtaagagcgtcccactgatcttacaaagaattttactgactctggtatagaaaggacagaagaaatattcatttccaacatatcacaagatgaaatcttctatatgtgtacatgttatagaatttcagatatatacaatccattagtgaatctgaattataattgatttgtctaattcattccctactttcagatttttttatgatttatttttatttcattttttagaggtggggtctcactatattgtccagagtggtcttgaactcctgggttcaagcaatcctcccacatctacctcccaaagtactgggattacaggtatgagccaccatgcctgccctctgattatttttaattcagtaattttatctttgtcttggaagtagaagggataaaatttaagctactaatatactgccaactttttacttttaaaattactcattctggcccgtcgtggtggctcacgcctgtaatcccagcactttgggaggctgaagtgggtggatcatttgaggtcaggagtttgagaccagcctgcccaacatggtgaaactccatctctactaaaaatacaaaaattagccgggtggtagtggtgtgcgcctgtaatcccagctactcaggaggctgaggcaggagaatcacttgagcctgggaggcggaggttgcggtgagccaagatcatgccactgcactccagtctgggcaatagagtgatgtcctgtctcaaaaaaataagtaaaaacaaataagataaaattactcattctgaaaaatatatacaagcctgagttgtttcaatagttatcaatattaatgaatgcagatttaggaatgtgtgagctaaaaacaactagcctgcaattaatagaataaagcataataaagaattaacagaataaagcatactggaatttaaaaataatgcatctttatgaagaaagcacattttcttaaggacctttgccaatataaagttttactttgagaaaaattcatgtttcacatggctacaaacctcaaagaaatgttctgatgttgtttcactggagaccagtgtataagaattggattgatgtttgtcccttttttcttattttgcaatacgttttcattattatatttactaaatgaaaagttttttctttctctgaaaagcttacacctagtgcttttccttgaattcattttcactgatttctgttatgatgataatttattcagctgaaaaatgcctagattcaaagaaaattcaataatgcaaaattcaaagatcttgctaatagaaaaaaatgtgagctaatgtcttgtagaaaatataggattatatatttgttgactgaggttggggaagcacttcttaagatcaaataacttggacaataaggcaaaaaattgatggattttattatattcaaattaaagatttccagtcaacaaaaggttagttggatcaagttaacagacaaatgacatattgggagaagatagttgcaacatctaaaatgaacaggggatttatatcttgaaacatccagaaattcctacaaatccacaagaaagagacaaaaatattcaactgagaaatgagcaaaggataagtatggaatttactgaatgagaaatcctgagtggccaatgagtatatatgaagaaatgctccaattcaacaataatgagaaaaaacacaaattacaacagtaagggaaatcacttctcatctattaaaccggcaaaaaattagaaggatggaaatgccaagtgctaaatatggggggtagggatggggtagcctcatgcattccaggcgggagcattgactggcacagccattctcaggagtactccagcattctctggtccaatcagtcatgcacacatcatataaatcctactctcagacataaagcccagaaacattctctcacacaggtccatacggccatgggggagggggatccatgcaatgctgtttgcactgaactggactccacccaggtgtcactcactgggggcctggataataaaatgtggtgttggctcactaacaaatatgatcgaatatgatcaactagaccaggggttcccaaacattctcacttcatgcaccaatgtcttcacggtgttcctaggccaaaagaaatggctaacagctctggctagccattctgttctgttattaagtagatggtccaaacagcttaataggtatttatgtcccaacacactagtacctgtttgaagaaatttatacacatacattggaggaaaaaataatatttcattcttaaataaccagaattatttactgaggggatgtgatgtgtgtgcctgttgggcaccgtgtggcttctcaaatgttggggtcagattggacatgtgcccttattttgtttccccttgattttcatgcagtatctgcttgtcactacaactgctaaaaatacagcttcgcaaaaataagatgtcatggaaaggaatgtagcagtctaatgctggaactgtgaactacctcaagttagtggttcacatgatgcctgacagatgttttgcatcactgtgtttcccaccaaaatggaaagtatcccaaagcacctctatgggttccctgaagctacccagagcacgttggtgcagtttgggaaccacaggattagatatatacatgaatattaacaaatcttcaaaacggtgctgaattttaaaagtacttaaactgttaggggctgaatgtttgtgtctctccaaaattcactgaagtcctaacccccaatgcgatggtattaggagatggggtctttgggaggtaattagatctagattaggtcaggagggtggggacctcatgatgagattattaaattttaagaagaggaaaagatgagagagctttccctctccccacatgcatacttggagataaggctgtatgtgagcctacattaagaaggctgctgtctacaagccaagaaaagagccctcaccaggaactgaatttgctagccccttgatgttagaattcccagcctccagaactgtgggaaataaatacctgtcatttaagccatcaatctgtggcaatttgtgaaagcagctcaggctaaaaagcacaaagtaaggtctatgggcttgctcttgctgttttgatgacctgccctctttactgctaagcctgagggagaggctcctaggcagcacttcaccctgtcaaaagccctacctcccagaaaggttctagtgcaggagtgtccaatcttttcacttccctgggccacattgggccacacataaaatacaccaatgatagctgatgagctaaaataaaaatcccccccaaaatctttttattattattattattattattatactttaagttttagggtacatgtgcacaatgtgcaggttagttacataagtatacatgtgccatgctagtgcactgcccccactaactcgtcatctagcattaggtatatctcccaatgctatccctcccccttccccccaccccacaacagtccccagagtgtgatgttccccttcctgtgtccatgtgttctcattgttcaattcccacctatgagtgagaatatgtggtgtttggttttttgttcttgccatagtttactgagaatgatgatttccaatttcatccatgtccctacaaaggacatgaactcatcattttttatggctgcatagtattccatggtgtatatgtgccacattttcttaatccagtctatcattgttggacatttgggttggttccaagtctttgctattgtgaataatgccgcaataaacatacgtgtgcatgtgtctttatagcagcatgatttatagtcctttgggtatatacccagtaatgggatggctgggtcaaatggtatttctagttctagatccctgaggaattgccacactgacttccacaatggttgaactagttgacagtcccaccaaccgtgtaaaagtgttcctatttctccacatcctctccagcacctgttgtttcctgactttttaatgattgccattctaactggtgtgagatgatatctcattgtggttttgatttgcatttctctgatggccagtgatggtgagcattttttcatgtgtcttttggctgcataaatgtcttcttttgagaagtgtctgttcatgtccttcgcccactttttgatggggttgtttgtttttttcttgtaaatttgtctgagttcattgtagattctggatattagccctttgtcagatgagtaggttgcgaaaattttctcccattttgtaggttgcctgttcactctgatggtagtttcttttgctgtgcagaatctctttaatttaattagatcccatttgtcaattttgtcttttgttgccattgcttttggtgttttggacatgaagtccttgcccatgcctatgtcctgaatggtaatgcctaggttttctcctagggtttttatggttttaggtctaacgtttaagtctttaatccatcttgaattaatttttgtataaggtataaggaaaggatccagtttcagctttctacatatggctagccaattttcccagcaccatttattaaatagggaatcctttccccattgcttgtttttctcaggtttgtcaaagatcagatagttgtagatatgcagcgttatttctgagcgctctgttctgttccattgatctatatctctgttttggtaccagtaccatgctgttttggttactgtagccttgtagtatagtttgaagtcaggtagtgtgatgcctccagctttgttcttttggcttaggattgacttggcgatgcgggctcttttttggttccatatgaactttaaagtagttttttccaattctgtgaagaaagtcattggtagcttgatggggatggcattgaatctataaattaccttggacagtatggccattttcatgatattgattcttcctacccatgagcatggaatgttcttccatttgtttgtatcctcttttatttccttgagcagtggtttgtagttctccttgaagaggtccttcacatcccttgtaagttggattcctaggtattttattctctttgaagcaattgtgaatgggagttcactcatgatttggctctctgtttgtctgttgttggtgtataagaatgcttgtgatttttgtacattgattttgtatcctgagactttgctgaagttgcttatcagcttaaggagattttgggctgagacaatactggcaaaccgaatccagcagcacatcaaaaagcttatccaccatgatcaagtgggcttcatccctgggatgcaaggctggttcaatatatgcaaatcaattaatgtaatccagcatataaacagaaccaaagacaaaaaccacgtgattatctcaatagatgcagaaaaggcctttgacaaaattcaacaacccttcatgctaaaaactctcaataaattaggtattgatgggacgtatttcaaaataataagagctatctatgacaaacccacagccaatatcatactgaatgggcaaaaactggaagcattccctttgaacactggcacaagacagggatgccctctctcaccactcctattcaacatagtgttggaagttctggccagggcaattaggcaggagaagggtattcaattaggaaaagaggaagtcaaattgtccctgtttgcagacgacatgattgtatatctagaaaaccccaaaatcttataatattttaagaaagtttactgatttgtgttgagctgcattcaaagccatcctgggccacatgcagcccatgggctgcaggttggacaagctcggtctagtgaattccaccattacacctctctcatgatctctttctgtgtctttgatagccttcacagctccctatgtgggttcatctgtccactctgagccctttctgtgcaaactaacccactcttattgggagctgacatctgctgtcaaaagacaaaattacaacaaatttaaagatcctaaatggattttatctgtgattctagaattggacaacacctcattctgtacaaaagaaggagtgttccaatgatctgagcaaaggatgtataaccacccgacaggttcaccttgcccactgcctagacagagccaatttatcaagacagggggactgcaatagagaatgagtaattcacacagagccagctgtgtaggagaccagagttttattattactcaaatcagtctcccagagcatttgggaatcagagtttttaagaataatttggtgggtgggtggaggccagtgagttgggagtgctgattggttgggtcggaaatgaactcataggaatttgaagctatcttcttgtgctgagtcagttcctgggtgggggccacaagatcagatgagccagtttatggagctgggtggtaccagctgatccatcaagtgcagggtctctaaaatatctcaagcactgatcttaggttttacaatagtgatgttatccccaggagcaatttggtgatggtcagaatcttgtagtctccagctgcatgactcctaaaccttaatttctaatcttgtggctaatttgttagtcctacaaaggcagtctagtcacaggcaagaaggagatttgttttgggaaagagctgttatcatctttgttttaaactataaagtaagttcctcccaaagttagttctgcctatgcccatgaataagcaatgacagcttggaggctagaagcaagatggaattggttaagtcagatctctttcactgtctcagttataattttgcaatggcagtttcattaggccacgttaactaacttctctacacctcagtttctcactctgtaaaatgaagatggtaagttatacgaagttcaaagtgagtttatactggtagacatcagaatagtgattgccttgggagtttaggaagggtcatgaaggaaacttctggagtggtggaaatgttctgttttgatctcagtgtttatatgggtatatacatacatttttaaaaagtcattggccaggcacggtgactcacgcctgtaatcccagcactttgggaggctgaggcaggtggatcacatgaggtcggagtttgagaccagcctgaccaacatggtgaaaccccatctctactaaaaatacaaaattagagccatacgcagtggctcacgcttgtaatcccagcactttgagaggatgaggcaggcggaacacctgaggtcgggagttcaagaccagcctaacaaacatggagaaacctcgtctctactaaaaatacaaaattagctgggcgtggtggcggatgcctgtaatctcagctactcgggaggctgaggcaggagaatcacttgaacccagaaggcagaggtttcaatgagctgaaatcacgccattgcactccagcctgggcaacaagagtgaaactccgtttcaaaaaaaaaaaaaaattagctgggtgcggtggtgtgcgcctgtaatcccagctacatgggaggctgaggcagaagaatcagttgaaccagggaggtggaggttgcagtgaccggagatcacgccactgcactccagcctgggtgacaggagtgaaactctgtcaaaaaaaaaaaaaaaagtcatcaagcagttaagattagattaaaatgcagtaatctaatcttaattagattagatacttagatacctttatttaaaattttttaaaagtggagataatagtacctacttcccagcatcattgtgacgattaaatgtgctcagcaggttgcataattgtttctgatctagctagtatccagtatttgtctattgtcacaggtggtgactgctggaggggctgagtccccaataagctgtgaatgtcttggaggacaagtatgttggccccttcttgttctagcagtgaagaggatcccatgtagactccaagcagctcaagttcagcaagggagacagaccattgcaagtgcatgaaaagggcactggtgggctgggaagttcgtaggaggagcctctcacatgctgggtttggggaggaattctggaaagcagttagtcttagggacgggaaggatgtagctggtgggacaggcgccctcagctccatgaataaaaggagtgggtctgactctggttctcattcccctttaccatgcctggcacacattagaccatcaataccaattgactccaggaaggagtgtctccccgtgggggcatcaggagccgctgagtttaaatacacaggtgggatgtgacacactgggaaccattcagatttgctggatctggatagggcttgtcaggactcagtgcttccaaccccagggcccatttccctgtggcccctgagtcaccaccatgggtggacagctgctccagtgccaagatacagccacagaggacggcaggcccagggcctccagaaggacaggcaggctccctctgaaagacaagccggcttatagctgaaacctctggcccaggcgtcctctaagggaagccaggcggtgtcagggcacggcccatgaagacataagatgaagatggggagaaccagagggggtgcgcttcgaaggaaagcgggctgcgtgggggcaccgtcgattgcacaggacgcggtcccggctcgcgtagccccgcaggcggcgccagagcgcaagcccgcctcgtgactccggtccacagtccggccgggcggagctaggggcgggcccctgcgtctctgggcgctggagcgcggcgactatcacgccgcgtggcggacggacggactgacggacgcgcagccttacccgaaaggccatggcggagcacgcccctcgccgctgctgcctgggctgggacttcagcacgcagcaggtacagtcgcctggccgcagggccacggggccgcctcctccgcttcggtgggggtagggggcgggctgtcacccggacgcgggaaaacatgggcccggccgcgggcgcgcctacctctcgggcttcccggggcccccgcgcccctgccctgcgcgcggccgtggggcgccggtgccctcgcccggagatgccctgccaatgccacccgctcgcaagatgcggcctcgaccccgcctggacccagctaccccaggaaactgcaggcgctcctcggcaggacccccggtgcccagaggggccggaggactcggcgggttcctgcgctgttctgggcacccagtgacggggatccgaaggaagtcagctactgtaaggcaggggaacagacaggcgggtagccctgcgcacatgcacaaccagtgacctggaagcagattatagcccaaaacctttttttaaaaattgaaatggcccaggcctggtggctcttgccggtaatcccagcactttgggaggccgaggcgagtggatcgcttgagcccaggagttcgagaccagcctgggcaatatggagaaaccccggtctctaccagaaaatacaaaaattagccgggcatggtggagcacacctgtagtcccagtttttctggaggctgaagcggatcgcttgagcccaggaggtggagattgcagtgagctaagatggcgtcaccggtctccagcctgggcgacagaacgggaccctgtctcaaaaaaaaaaaaagaaaaaagtgaaatgcatagtgtacaagtggactttaccctgtgaccgcccttcgttgacaccagcttgcctggtctgtgcacccaggactgctggccagaggagcagtgtgctgctgccaacgccctgcagacaggcaagcaaatcaaaatttgccttcaaagagggcatggggtgaccgggggcaccttttcctttaaagtacttgggaaatatacacagttgcagtcaaacccctcttctcgaatgggtcaagggaggcaggcctctggccagtccttgggggaacgtcctgtgggactctggatgactcgagttgccttgctggacctcagttttcccatctgtccaggaaaggagttatactcccaagcttggagattgcttcagtgggacattaatgtctctggaccacaatcatggcctgtgagaatagcccatggccttgcctggtctcaggcctctgcagacatggatccccagagatgcctccaaaccttgcttcccattccttcctctctggcactttctcccgcctccttgtcaggtgcacgaaccaactcatctgtgaacatcttcctctagagggtcttggctttggctatttggggaacaaagattccttgagacatgtgggtgttcctacttagcctcagtttcttcattttactaaatctttgagtgttaccccagatgagtcctctgttaccacgattacggtgaggcagccctgccttcaaggaggtctctaggttgaactgctcctagggtgtggggcctcatctggtgacgttagtaccccctggaccagtgtagaagctgaggaaaattctacacttccttttttaaaatgcctttcaggtaaaggttgttgctgttgatgcagagttgaatgtcttctatgaggaaagtgtgcattttgacagagatcttccagaatttgggtatgtacttgatgtgcatgtgtgtgtgatgggggtgttggttttggggtcctcccgcaaacttttgtattcgcagaccgcactgttgaggctttgccaaatacaggagtggtggtctcggcagacctttcaagcatctttttttcctatacctagagtgccatctcccccatttcttcctaattccattcatccattcatgaagtaagcatcagttgagacctactttgtgccaggtgctaggacctgatggcgaaacaaaaagagaaagctctcccagagcttcccactgagtagtggagactggtatcaaacaaagaatctcacaaaagagtgtttcattataaactctgagaaggcctctgaaggaaaggaactcacttctccaagtgcttattataaaggaatgtgactcagacttgggaggggaagtcccagagcgtctctagggaagtggtgcttaagctagagatcagagtgagtgaagttagccaagcgatggaagggaagttggccaggtgatggaagagcattccaggcagaaggaacaacatgtgcgagggccctgtggcaagaaagagcatggttcattccttcatgcaattgaagaaagccaatgatgctggggagcagagagaggcggaggctggtcagagctccataggccatggtatagagtttgtctttattctaaaagctatggtcagccactaagggccataaggggtaggggtatgggtgaggtatgaatgacaggttgtatttttgttttgaaaatatctctctgggggcattgggagaacagattcggagcattgctggaatggacgtggggaactattaaagaggtttttgctggtcattcaggtatgaaatgatggataggagagagctgagtagtaaaatggacaggtcctgttacaaaattgaatgtgagatgtaagggtgggatttctggctgtccttcagagtggatgttggactgtgggaaagaatgagttttggagagaaagatcatgagttcagcttgggctgccataacaaggtaccatagactgggtgggttaaagagcggaaatttatattctcacacatctggccgttaggagtctaaaatcaaagtgctgggaagattggtctcctctgggacctctctccttggcttgcaggtgaccactctcttgctgtgtcttcacatggtggtcactcggtgcaggagtgcttggtgtctctgtcatctgtatcctaatcttcttataaggacatgagtcatactggattaaggcccattctaatgacttcattttaacttaattgcctttttaaaggccctgtctccaaataatcacaatccaaggccctcggggttaggatttcagcatatgagttttaggggcagagggggcacaattcagtccgtaacactgtggacttgctggttttgaggcaccctcgtgagggcctggtaaaagtgtccttccctgtctgttttagacacacttcctctttgaagccttcccagctgaccctttgtgcacctctcattacccatcacattgtgttgccaactctttgcccccagctaatgcggccccatggagccgaggttagaagccatcttgctttctcacattttttattattgcaggccttgcatgtttgcctttgggtagttggtatgtttcaaggaattggtcttttcaactaagccatcaaatgtgtggccatagtgttgttcataatattcctttatcctccttatgacatctgtgggaccagtaatgatgatctcttgctgttggtcatttctgatattggtaatttgtcttctctctttttttctttggttatcctggctagaggtttatcaattgtattgatcttttcaaagttcaacttttggttttgttgattttcccctgttgttttcttcaagttgtgctctaatttttattacttagtttcttctgcttgctttaggtttaaattgctcttttttccctagtttcctcaagtggaaacttagaggattgatttaagaccttcttttctaatatatgcatttaatgctataaatttctctgtaaacacaaatgctttttatgggatgccttagcagcatcccatacattttgataagttatagtttcattttttttcgttcaaaatattttttagttctcttgagacttctttgactcatgggttatttagaagaatgtttttaggctgggtacagtggctcacacctgtaatcccagcactttgggaggctgaagcaggcagaacacttaaggtccggagtttgagaccagcctggccaacatggtgaaaccctgtttctactaaaaatacaaaaaaattagctggacgtggtggcaggcatggtgacaggcaccgtgtatgctgcacgcctgtaatcctagctagctgggaggctgaggcaggagaattgcttgaactgtggagagggaggtttcggtgagccaagatcgcgccactgcactccagcctggacaacagagggagagcctgtctcaaaaaaaaaaaaaaaaaaaaaaaaaaaaggaagtctggaagtgtgttgtttaatctccagattttccagttttctgttattgatttctagtttaatttcattgtggtctgagaacataccctatatgacttctagtctttcaaaattttaaaatttcctctccctcactctctcttccacttaataagtcagtcctctccactggacatttaaaaaaaggtgtccataaccaaaatatggtattgcttttttccattatattttcaagatattttaaaccagatgcctatagatttagttcattccttccccatcacctcaattgcattgtgggttttctttttacaactttattaaggtataactgatgtacaatactgtgcatatttggagtatacagttaaaagctttaatatctgtattctttcatgaaactatcaccaaaataagacaatgagtatttccatgtcctaaaaatttcctcctgcctctttgcaagcgatgcctccttccccatacccctacccactggcaaccgctgatgtgttttctatcactagtttgtattttctagaattttgtatagatggaatcataattatgtatgcttttttaaaacctttaaaattttacatcacagttttgagattcatccatgttgctacatgtggcaatagttggttcctattattgccgagtagtatttcattgtatgatgttgtatggatggactacaattggtttcacctgatgagggatattggggttgtttctcttttctgttgttataagcaaagggctatgagagtcacatacaagtcttttcgtggacatatgatttcatttttcttggaaatgacataccaggagtacagtggctgagttatacggcaggtatatgtttaacttcttaaggaattctcttccaaagtggtgattttaagaaaaaaaattttatattgttaacaggcattacattgcacttaatatgtaactcaatgaaaagtatacagtgaaaagtctttttttttctttttttctttctttttttgagacagagtctggctctgtcgcgcaggctggagtgcagtggcacgatctcggctcactgcaagttccgcctcccgggttgtcctccattaggaaatggtacatctacacaatggaatactacacatctataaaaaagaacacagaagtttttatgtattgacatgtaaacacagccacgttactgtgaagtgagtaaagcaaagtacagatcagtgagtatagtatgctttctcttgtatgaaaggaggaaaatcagaatattcataccttcctatatttccatgtaaaaacactggaaggagcctggcacagtggctcaagcctgtaatcctagcactttgggaggctgaagcgggtggattgcttgagtccaggagttcaagaccagcctaggcaatatggtgataccctgtctctaccacaaaagtgcaaaaattagtcatgtgtggtggcgtgcacctctagtcccagctacacaggaggctgaggtgggaggatcacttgagtccagaaggtggaggatacaatgagccaagatcataccactgtactccagtttgagggacagagccataccttgtctaaaaagtaaaaaaaaaaactagaaggatacacaacaaattaaagtcatctgtagagaagggacggagaggagagatgagctcacaggtgggattaagacttttcactgttatatggggtttcaccatgttagccaggatggtctcgatctcccaacctcgtgatctgcctgcctcagcctcccaaagtgctgagattacaggcgtgagccaccacacctggccaagttgtcgctattattgccacgcacagatatttatgtcattgaatttcccagtctcttttattgcttctagattttgagtcatagttcaaaaggccttcctcactccaaaattatgaaggaactcacctatgtttttatctagttcttgtaagatttcagctttcttacataaaaatatttggagtttatccaggtacgtagtatgacatttgtatccaactttaatttttcccagatgattcttcagttgttgtaacaccaaccatgtttttatttaatttattttttttatttgagacaggagctggctgtcacccaagctggagtgcagtggtgtgattcagctcactgctatctatgcctcccgggctcaagcaatcctccctccttagcctcccaagtagctggaaccacaggtgcgcccctaccatgaccagctaatttttttgtattttttttgtagagatggggtctcactctgttgcccaggctggtctcgaactcctgggctcaagcagtccacccacctctgcctcctaaagtgctgagattacaggcgtgaaccaccacacccagcctcaaccgggtttttagaagcccatctttacctttaagaggctgaggtgggcggattacctgaggtcaggagttcaagaccagcctggctaacatggtgaaaccctgtctgtactgaaaatacaaaaattagctgagcatggtggtgggtgcctgtagtctcagctacttgggaggctgaggcaggagaatcacctgaacctgggaggcagaggttgcagtgagctgagattgtgccactgcattccagcctgggtgacaaagtgagactccatataaaaaaaaaaaaaaaaagaagtccatctttacctccatgatttgagatgtgaggcttatcatgtgctactttctgtgttcacttaggtccatttttgggcttttgtttttgttccatggtttggtagatctgttcataagccagtaacacattgtttcaattatcccagctctgtaatatgtttgtttgtttgtttatttacttttgagttggagtctcgctctgtcgcccaggctggagtgcagtggcatgatctcggctcactgcaacctctgcctcctgggttcaagtgattcttctgcctcagcctcctgagtaattgggattacaggcgcccgccactggctaatttttgtatttttagtagagatgggtttttgccatgttggccaggttggtctctaactcctgacctcaggtgatccgcctgccttggcctcctgaagtgctgggattacaggtgtgagccattgcacccggcctgtaatatgttttaatatctagaattgttggtcccctctgtttgtttttttttccagagtttccatggctattcttgttctttttcaatatgtacttcagaatcagcttttcaggttccagaaagccaaattgttaatttttttttttttttggacatggagtctagctctggagcccaggttgaagtgcagtggtgtgttctctgctcactgcaacctccacctcctgggttcaagcaattctcctgtctcagcctcccaagtagctgggactacaggcacataccactacacttggctaatttttgagtttttagtggagacagggtttcaccataattggtcaggctggtctggaactcctgacctcaggtgatccacccacctcggcctcccagggtgctgggattacaggcgtgagccaccacacccagcctgttgttaatatttttattgagatcatattatctttataaattaacttggcagaattgacaactttatgagattaagtcttcctgtctaagcacacgttatgactttccatttgttcaagtcttcttttgaatacttcacatgtgttttaatatgtttaacatacagcttttgctcactttggtagattgcacaaatgaccacaatactccacccatccctgtacccacaccctttgcaatgtgactgtaattcctcccatcaaggagtcgtttccctacctgttgatttgctttatccagtagaacaggggaagtggcattgtgccagttctaagcctaagcctcaagcagccttatgtgcttctgctgtcattcttggaactctgcctagccaccaaatgaacaagctcaggctatactgctggagagttggacatatgtggcctagttgccccaacttcttcccctaagagccagccagcccctagctactgttagctacctatgaagcagagccttctagctaccgttaactgactgcagatgtatgagtgagcccagctgagccccatccaatgatagcaagtagaattgtgagcttaatggttttgagccactaagttttgaagtggtttgtgacaatgcagaaattacccaatgtagataattatttttaagtttatttctaacttttttatccttttactactgtaagtggggaagggaggtttctagcagaaacttatcagctgtcttccaaactcatttccctttcttcctaggcactctcctgccttccttgtagttatgttcagccatgtgactgagttctagccagtggaatataagaaaatgtgatcaggcctctaaaagacctagtccatcaaaacctccttctctgacttttctcccatttttggctgatgtgggtgtccagagcaaccttggaagcacatgtggaacatgacagagccaccatcaacctggttcctgaatgactgcatggagcagaactccccactccccactcatgttcctaaccacctactgattgtgctttacatgaggagaaagaaacttcagctgtatcaagccatagaaatgtgtttttccttaactaatataattttttccctcatatcctttttttaaagaaaatactggggccaggtgtggtcgctcacgcctgtaatcccagcactttgggattacagaggcgggcacatcacgaggtcaggagatcgagaccatcctggctaatgcagtgaaaccccgtctctactaaaaatacaaaaatttagccaggcttggtgccgggcgcctgtagtcccagctactcgggaggctgaggcaggagaatggcgtgaacctgggaggcagagtttgtagtgagccgagataatgccactgcactccagcctgggtgacagagcaagactctgtctcaaaaaaaaaaaaaaaagaaagagaaaatactgtttctattgaaatgtaattcacataccataaaattcaccttttaaaatgtacaatttgatggttttagtatattcaaagaacaatatcactatcaccactatgtaatcttagaacattttcaccacctggaaaggaaaccctgtattaattagcatccactgtatagtccccctcctgccagtagtggcaaccacaatcaactctctatctctggatttgctgattctggacatttcgtagacatgaatatatataatatgtgacagccttcttttacttagcataatgctttctttttaaaaaattttcatagctttttgtttatttcaaataccaacttgaaccagatacctggcataatgttttcaaagttcatccatgtcatagcgtgtgtcagtacttcattcctttttgtggttcagtaatattccattgcattgatatatcagagtttgtttttccattcaacttttagacatttgagttgttctgcttttttgctattgtgagttattctgctatgaacatccacatatgttatggattgaattgtggccccccagaattcatatgttggaagcctaccctcatcatgacagtatatttggaggtgaggcctttaggtagataattaaggttaaatgaggttgtaagggtggggctctaatttgataggacctgtttccttataagaaggagagacaccagtgctatcccacttcatgcgcagatgcacagaggaaaggccttgtgagaaggcggctgtctgcaagctggaaagagagccctaaccagaaactgaatttgctggcaccttaattgtggacttctagcctccagaactgtgagaaaataaatgcctgttgtttaaaccatctagtttatggtattttgttatagcaacctgagcaaactaatacaatgtatacgtttttgtgtggacatatattttcatttctattgggtatattacctaaaattggaattgcggggtcacatggtaactctgtgttcaacattttgaagaattgccaaactgttttccaaagtggctgtactattttccattcccaccagtggtagatggtgcctctagtttctctacatccttttttttttttgagatggagtcttgctctgtcacccaggctggagtgcagtggcgtgatctcggctcactgcaagctccacctcctgggttcatgccattctcctgtctcagcctccctagtagctggaactacaggcacccgccaccacgcctggctaattttttgtatttttagtagagatggggtttcaccgtgttagccaggatggtctcgatctcctgaccttgtgatccgcccgcctcggcctcccaaagtgctgggattacaggcgtgagccaccgcatccttgcttaacatttattattgactgtctttttaattacagacggcagccatcctagtggatgtgaaatgcaatctcactgtgcttttgatttgcatttatctaatgataataatgatgttgagtatctttgccatttgtgtatcttctttagagaaatgtctattaagatcttttgcccttttttaaaaaaaaactgtgttatttctcttttattattgagttgtaaaagttttttttaatgtatattctggaaacaagtcccttgttagatatgtgatctcaaaatttttgtcccattctgtgggttgtcttttcactttcttgatgatcctttgaagcaatgtttttaattttgataaagtctaatcttcctacttttttccttttgctatttgtgctttggtgcagtattggttaggttttggtatcaattttatatttacttcactaaaataattggaaaaattttccttcttttcaggtgctctagaacaatttaaatagtattagaaatatttgctatttaaaagtttggtataatttttctgtcaaaccatttgggcctggtgcttttggggcatggggtggctctggtcttccttcttagctggaaatgccagttttgttttgtgtgtgtgtgtgtgtgtgtgtgtgtgtgtgtgtgtgtgtgtgtgtgtttgagacagagccttgctctgttgcacccaggctggagtgcagtggcaagatctcagctcattgcatcctccgcctcctgggttcaaacaattctcccaccttagtctcccaagtagctgggattacaggtgccctccaccatgcctggctaatttttgtatttttgtagagatggggtttcaccatattggccaggttggtcttgaactcccgacttcaggtgatctgcctgccttggcctcccaaagcactgggattataggtatgagccaccgtgcccagccgaaatgccagttttaagttgttaaatacatggcagaatgtctggttacagtttttatctgttttgtgaaggcaacattttttggtgagcttttattgtctgtagtaaaattttgttgctctcttcctctttttccctagtagtatctttttaaaaaatccatattattgagtataatttatgtacaaaaaatgccatccattaaaaatgtataattaaaggtactttgccagatatagacctatagctgtgaaactaccaccacaatcaagatacagaatgtttatatcaccccccaaaagatcgcttttttccctgcttaccgagacaagctcggttgtggagactccaacgcaccagcactagaggaatgaagacaaagacccagaaataaagtgcagtgtgggaatcggctaaaagcctttagagctgagagccacaaacagagttttgcccacatatttattgacagtaagcctgtgataaacattgtttctaaagattatagattagctgaaagcatttcttatgggaaacaaagcattcttttcaagaagcagagaaacaggctgtggctgattatctgcagcaggaacatgtccgtaaggcacagatcgcttatgccattgtttgtggtttaggaatgccttgagtggttttccgccctggatgggccaggtgttccttgccctcattccggtaaaccagcaacctccagtgtgagtgtcatagccatcgggaacatgtcacattgctgcagaaatcctgtttatggccagtttctttaaggcctgtttatgacaggcttagggcctgttcccagcacccactagacttagacaaccactgatctccttttctcagtatagatgaatttgcgtcttctagtctgttcctatataagttataattgtgtacatatgaatagttcatattttttcttgctctgtagtatgatatcacaaatatacaccacgatttatctgttcacttgtttagggacactgggttgactccagttaattattacaaataagtctgctatgaatatttgtgtacaaatctttctatgggcttagactttcatttctcttggctggatacttaggaattgaatggctagatcacatggttatctaatagcatcttggtgtggattctgagcctggttttctctttcctaacacatagttaaaagggttggattttatcagatcagctctttgcactagagtcttctaggggtgaggtgggtggggagagggttccagtcaaacttccaaagcctgtagtccaaggacttgttggtctgttgtgatagtagagacactcttccctccgacgcagcatctctgtgtggctgcccctcctctacctctccaaacctatggggcttgagagggattttataatccaacactgcactcccctagggtgagcctttcttatctagaaggcttctttagaagatgcttctgagaattgccacatctgggccactctgggcaatttgcctgtcttctctttccatctttgcagccctcgtgcctgttcaatcaacagttcccacttggggttggggaaggttctccttcatctggacatttccagagtcatccaccatagggtttctcctggctttgcaatggtctgcctgccctgaggctctggtctacattctctgttgttcttgcaggactcagggtggtgttcatgtgcacaaggatgggctgacggtcacttctccagtactaatgtgggtccaggtaagcgcagggattcctattctccttctatccccaggctgtctcactggcagactcggtgatttgctaggaagtccaaaggtggcagccaatgagagcatctgttgtcaccaggtcctcatgggaaggtggagttggcatgactcctgggatcaggctcagcctcagctggtgtcaacactcccaggctcagaggacttacaaaaaacttccaggtactggagctacagcagatggcaagtcctgccattaaccacctttaaaataacacagagcaaatcttttccaaacatctgcagtcaggccctgtggcctcccttgtaccatgaaatatacaaacatagactgggcatggtggctcatgcctgtaatcccagcactttgggaggccgaggcaggtggatcacctgaggtcaggggttcaagaccagcctggccaacatggtgaaaccttgtctctactaaaaatacaaaaaattagccgggcgtggtggcccatgcttgtaatcccagctactcaggaggctgaggtaggagaatcacttgaacttgggaggtggaggttgcagtgagctgagactgcaccattgcactccagcctggataacaagagtgaaactccatctcaaaaaaaaagaaaaaaaagaaatacaaacatagcccttagggtcttagtgctcagcctccaagatcccttagctccctaatcacctagaatggcaagttatggcctggccagtcagactcatatcaatgccaagccaggcctgcctgctgaggatcaacaggaaaggagaatgcctgtagcaggatctggtgacctagggggccacaggagcagggatgtggacagcatagacaggcgtggtagctccaggggctacctcatcatatgctgcagggtccccgagtccctgaaactggaggccagctaagtgtgtgtcttccaaaagcttttttcagtcctccaatacctatctaaccaattccctatattacattctttttgttcaaaataactggtatgatttcttttttattggtgtaaccctgattcatacactggagaattggggtaaaggatggattttatccagataaactggctagaatgtacttcagagggggctgagccagaccaaggggcagagtgggagggtcgggggttagagacaatggtcagtgtcaggaggtcccagtgatgatgtcgagggcatctcataggccaaggccttcacctggggaggtgagcagtgggtgagaaccaggcttgggggcagggccaaggtgatttctgatctgacgcagcctccaggaccaaacttgatcctagctctgccagcccctgctccggctgcaccccactgcctgcccaaggtttgatgggcacagatagagatggcagccacagccagggctgaaagaagccctcccagcaaaggctgggggtggtggagtcaggcaaaagtgagagagtcttctctgccctcaggaaaacacaggtcagagtgaatctctaattcctgccatgaaatcttaggagggtggtgccaagctctgctgggcaccaccatccatcccactcactgggttttgctagaaaggagggtccaaccagacagtggaggctggaataggggcctggaacaggtggccatcatctctatccactccctccagcctctggctcctggacacagggagtctgggcctgatgctttgctctcacgggagctctctcctttgctcttcacttccctgttgcagtgaagtcagatcactaatatagagggttgaaaatgcaaataaaagaaggcaaaagttggctgccttactttgttagtttttgagacaaggtctcactgtgttgcccaggctggagtgcagtggtgtgatcatggctcactatagcctcaatctcctgggctcaggtatcctccctcctcagcctcctgagtagctgggattacaggctcatgccaccacacccagctaaatttttcattttttgtagagatgggatctcattatgttgcccacactggtcttgaactcctgagctcaagtgatcctcctgccttggcctccaaaagtgctgggattacaggtgtgaggtgatggcatgcacccgtagttccagccacttgggaggctgagatggaaggatcacttgggcctgggaggttgaggctgcagtgagctgagattgcgccactccatttcagtctgggaaccagagcgagaccctgtctcgaagaaaaaaaaatggagaagtaaaatttgaggattggtggtttatgattccatttatttaaaatatttttagcatagttgacctttttatttgattgatgcctacttgtttaattaatgtactctagtgcttacaaatcccaagtcatgagtttcttcatcatctgcccagagtactctgctgtaatggcaggcacttgcgtttcaattctgaggcttgcgtgtctgattcagtggttctgtacagtcatggtgggttctgtttttcttcttaggcactggatatcatcttggagaagatgaaggcttcgggcttcgacttctctcaagtcctagccttgtccggggcgggccaggttcgtttgcagcagactctgtctgccatgtgagggtgactgtcctgggcaatggtgtgggtgttgaagagatggcaacccttggatggggagcggctcattcttgacagccactgcacaaatttcactgtgaataaaaatccctacaactattttactttggagactgtataacttgtctcgttgcaaaaggatctgagacagttcttaggagtaagtattatataaaataggacgcttggtgagagaactgagttcctctgaaggggatggaggaagcaattgacatgaatttattatgactgcttgggggcaccacaattgcttttctatttcctgaaagtaaaagcaaagtcaaaaatgatcctaataatgatagtagtttcagtagaaggaagagtattaataatgatatcagaggacattgactgagcacttagtgcatgccagatacaactctgaggcctttccagatgtcatccaacttaatccttatgattctacagggtggtgctgtggagtgcttggtacacactcagggcatactgtctgggtttgatccctggctctgccatttacaggcagtgacctgggatacgtcatctggctttctggtgcccccgtattctcatctgtcatagggtcattgtgagtgtaagtacatagcacagtgcctcctattaatacgcagtaaacattattaaagcttgggcttctgttattatcgttgatatttacatgaggcacggagaggtgatgtcacttacccaagatcacacagtgctgggagtgggagtcaggacctgagtctatctcattcagtcccttggctgtgctgggatcacttttctccatgctggattactgtattttcaaatcctcactaggatgtaactaatttttctgaagatgcttcttcctccatgacctaacaggaatttattgttttggttcttgttaaacacaacagagattccctgggtgatcttgtccacttctctctcccgaatcccaggcctggacacccatctccctcctagctaatccccgacccccatggctggatatcccacagatgcctcagacttagcatgtcccagactgagttctgtctcccttcagacctcctcctttctgggttctctttctcagggaattctccccatccacccagggcacaactcaagtgtcatccctgcctcctccaccttcccaccccacatccaagggtcctcacgtcccactgatttgtctgtgactcttgactctaccatctcttctccagcgctatctgcttgtcattcttctccaggtctctaccgcagcctccttgcctccagcctaccttccccgtgactcccacaagcctttaatacattcagctctgtgcacgctgctccccctggtaatccagggttcctaccacctccaagataaaccccagcctcctgagcatggtttcaggctcagtgctcaggctgtcccctctctcttcagcccatcacccacccccgacccagcctcaggcccactgcttagaatgccactcatcccgggacttgcctggcgcccctcacctgcagattctctgcatgcaacacacactaggaccatttcctgatactcatgaccacttcctctcatctgtacccgagttggttaggtgcctctgttcccacgaccctgtcactgcagctccatagggttttatagttgtacatttgtgtccttttccctgactcaactccagtagcctgaagaatagggatgaaagtatcctattcatctgtcgcaagcctggcatgatctatgtgcttaataaatgttcattgaatgaatgaatgaatgaatgaatggggtgagtgaataaataaatgaatttcaggtaatattacaagcaatgtctttaaatgcagttttacaaaaggcattaaaatccagaccaataattagttcttggaccttttctataagttgtagggtagacagggcagagttcctccccattttcttgaagtggaaaccaagtcccaggagggtgatgagctctgtgactaagaagtggcaggggcaggtgtggagcccagttctttggcatgtggtctggggtctttctgtgtcttcaggaggctgtgacactggtgtgtggtcatgtgaccatgtgcttgggtttcccaacagcaacacggaagtatatactggaaggctggagcccagcaggcactgacaagcttatcaccagacctccggctacaccagcagctgcaggtaactgtggctacgttgtgtgagtgtgagaaacttctgcagagtcccaagtcctgtgggtcctgaagcctgctcatctcagtgttgcagctgtgctcacgcgccctcaccagaagagctttcaacctcaggcttttggggagagaccccactgggccagttctaagttacagcacaaagggctggcccatgtgtctccaaccaaggtcacctgggaagaagcgtcatgactgccgtgatgggcagtgtgaccgccagccctggggcagatctccaagtcagcggatggagcttaagcctgtgcctttgccctccttcccaggactgtttctccatcagcgactgcccggtgtggatggactccagcaccacagcccagtgccgccagctggaggctgctgtgggtggtgctcaggctctcagctgcctcacggggtcccgtgcctatgaggtaggctgaggatgcggggggtgcagggggtggtctggttgcaagctccggaggcatagtgggtgacctgcctctggggggatcacatgaggtcatggaggtgttgtggagccagcaacaggcactctggcccctgggtcctgatccaggccacctgctgccctgtgtgttcccaggccaggctgggtgtgcacatggctgtgctcctgacatggaggtgctgtgcatgggggtgagggtaccccctcaatgagaaggcacctcctgtcattatttgtaacccggggattacaacaggacttacgttttgggtaggtttgaagctgaaagaagtcagtgcatgtaaggcacttagtgtagtgcctggcaatgttaaaaaaaaaaaaaaaaggaaaaaaaataatagtgtctctgttccacaggttcaaccttgtccccaggggtgattgtgattaggccagcttgggttacatgacctcgctggagtagaagttttggggatagggccaactctacttgggccacctgaaataacaatatgtgggtggggaaaataccccgatccctcacctggtggcttggtcagaacagtcaccgtgctgtgtgaagagcaagggttattcactcagggttgtccagtcctgatgtgggagaggccctccaggaaggcccagaagttactcacttctctatcctgtgggtgcagagccattgtttactgcctgagtatttgattactaaggacattttaaggattcaaaggccaagatcacattgttcagtagatatcaaacagatttaatgcttatttttaaaatatttaattattagaaacgaggtctcactgtgttgcccaggctggactcctgggctccagagttcctctcgcttcagcctcctgagtagctgggattacaagcgcacactactgtgcctggttggggcttacttttaaaagcttttatggtacctactcctatccagagcatgctacattaaactcactttgtggaggtaattgttcattctgtgtaggatttgggttcctaagaatttatattccttttccagcgttttacagggaaccaaattgcaaaaatttaccagcagaaccccgaggcctactcacatacggaggttggttaaatgttcctgtttgattgaaagtcacagttgaattcttttcataatatgttagaatagatacatcttacgtgcagtgactgaaaacattgataagcagacattaacaaatgatatatttgatttgcttttttctcattgtcaggacatttccaaagaggaggggaagaatggaatgtgggaaagagaagtcaggggttctcctgaccagaagggtgagggtgagggtccaggtgggagcactggggactgacgtgttcctgaggccacctgaatggaagatctgagtgtctgagcaggctgtgtctgctcactttcctatgtggttaacgcaggagggctaccaggcacatgattggcatagagtcagtgttttctttggaaatgtataggactgggcatttgtgtccccagctgtggcccttcagccagagcctctgtcacaggaacccaggttcattcctggctccacagttgctgaagccagcacttgttgctgcctgagaaacagccccacgccctggctagtgattttcatcttgtgataaggaaacgatcagctcacattaaaccaaagcacctttttaatcttagaaattaacatgtggtttattatttaatgatttgaggttccagattattctgcagcattagccattaatgtaggctttgggtagaggggtgaaaaccctccctaaattctgtgtgtggaacgaagtttgcctgacagaggacaggaggtgataacattctctccacagttccaaaggcccatgattctcatgtggaagtacagacccttagggtggcattgaaaatccatcatctatttctctggctagtgctcagggtctgtggcttctgaggagccagctttcctgacgccctgagagtgtcctggttggttctgaggccacacatccacttcccttgtaaccagaaggaaatgccaaggagatagaggaaggaaatcagggcacacattccccagcatgtggattccggatggaaatgcagcttccctaagccctttctcatagggcttttggtttttgtctcttttgaacttggcagttttatggcccatcagaaactgtagagaatgaatgctctcccgaggagtctgctcatggtattccagctgctcctatctgagatgcacagtctccaccattacttgggccttttgttcaaagtttccacttccctctccaattttttttcatgctttgtgtgtgtcagaagcattcagtagcgtagggtatgtggaagtgaggcacctctcactgtttctttcctttacagagaatttctttggtcagtagctttgctgcttccctgttccttggctcttactcccctattgactacagtgatggtgagcctcggggtatggggtgggtgcctgggcagtgtgcatgtggcatgtgggtgtgcaagcagtgggagccccacctaccccgagtgggtgccaatcttgtagccctgtcatctgttgccaggaaggaagtgtattcattatcttttaccacataacaaatgaccccaacacttagcagctgaagaccaccgtgtttattttctcacctagtgtctgagagtcaggaatgtgggggcagcttagcttggaggtactggttcgggatctcccacaaggtggcagtcaagctggcagccggggctgcagtcatctgaagggttgactggggctggaggatccatttccagcatcatgcacatgactacaggcaagaggcctcagttcctcacatgtggctgttagtgacactgcagagagggagggaggagacagaggccaagcagaagctgaggagtcttttataccctaatcttgaagtgatgtgccatcacttttgtctcatcttactggtcacacactaggtacggttgacccagtataatgttggggagaacctcacaaggggtgaacaccaggaggtggggatcagtaggggacgatcatggagcctggctcctgcaaggagctattaaagtttttgtttcacatttggtgaactcatgagatttgtgagcttctagaatcaaaaccccgaaaaaaataaattgcagttgatgccagtgaggagggaaagctgggaggaggttgctgcaggaactcttggatgagcctaagtgtgagaagagtgtggacagaatgggggtagagaatgcagggcaggagcccagagccgtggatatggcttcagaatggagcctgggatgctctgagcctcgtgggaattcatgggaagttttcgagggctgttgtatgccaggctttattctggtttcaggagagagagtgactaaggagtgctgttaagcttccctcacaatctggaggaggcaacagggttccctacagctagttctgtagaactcagacaggcagaacagtcaacttggagtagcctgcatgtccacccgttctgcacacctgccacagagctgataaccgcagcagctgttccggggggcattccagaggtttatgttccttagccacagctgggccctccactctgccccccttcactcacctgagatgtcacctcctcatttcacctgggcaggtgacaccatcagcatcccagcccacctctgtctgcctccaccttggcccagtggaggaggagttctctccacccatgctctgggttccctgtcctttcccatcctcaggaaagccttgggagaaggaggatgttttaggaaagagctagtaggttgatctcagtgaccagaaggaagtttagaggactctgagacctttccttgaaaagttagatgagattgagaaatccctgggagctgacctggaaacctaagggacatggagagtggttcctggtcagtgtgttgctgctagttccaggccccctgggaggtctttgagcagcagatttccaagctaactgtagtgtttgagttgatgaggaatatttggaggaggtgtggtgccgtgtgtttccaagggcccctcttgtctctggttctctggttctagaacaacacaagcatatataccttccatgaagaaagagctccaggtacaagttgtggcaagagaattatctgctctgtgccagatttgtgcattttcacaaaaggtccattttcaagattgtctgttgtttgtttccttccttcctcaggttctggaatgaatttgttgcagatacaggataaagtctggtcccaggcttgccttggtgcctgtgcacctcatttagaggagaagcttagcccaccagtaccatcatgctcagttgtggtaggtctcctttctggtgatgtggctcatttaagagctggcagctaccagggaagcactgtagcgcacacacacacacacacacacacacactctgcacacacccttatttgttcactcacccacaggcatacacatgcagggtcttcagtttagcctaagatgtaagtcagtgtctggatcagtgccttgcacacagtaggtgctcaggtacatgccttatggtcagcgggactttggaaaattccactagaaatttattagaatagggataaaaatggcaggtgattgcatagctaaagaaaaagtgcacagagtgctgaaattctagggactactgatgaagcttgaaggaggcagccttggggaaaatagaaataccagcggggctggcacagcacaggccctggcactggacagcatgggactgaattctggttctatcagctttgtgactttgtgtctcggtttcctcatctggaacaaggggaatgatgctattcatcttacagggctgttgtgcaaattagatgagttaatacttttaaagcacttaaaaaatagtgcctggtcccacaggtaatgggaaaaacatttacccatcacagcggccccacccatttgcagtggacactggctgtgaatgccctggggtgttctacttggccagccctgttctccattgtcctgtggggacagtggagtagagagagagagaaaaagatctgggtgctgcccctggggccctttggtgggaaatgcttaccacagagccagaacaaccagaaggaactctgggtgggacagagtgctggtgtgaagaagggacaagggcaccctgaggcctggagggagtcgtgtaactgggaatcttgggccatgtggaggaggggctgctgtgaggacttcgcgttgggagtctcagccacagaagcacttttgttttcttttcagagacagagtctcaccttgtcacccaagttggagtgcagtggcatgatcatagctacggcagccaccaactcctgggctcaagtgatcctcctgcctcagcttcctgagtagctgggaccataggcttgctccaccatgcacagctaatttttttttttttttgagacagagtctcgcttttgtcacccaggctggagtgcagtggcgcagtctcggctcactgcaagctccgcctcctgggttcacgccattctcctgcctcagcctcccgagtagctgggactataggtgcccgccaccacgcctggctaatttttttatatttttagtagagacggggtttcaccgtgttagccaggatggtctcgatctcctgacctcgtgatctgcccgcctcggccttccaaagtgctgggattacaggcgtgagccaccgcacccggcctaatttttttttattttggtagtgacagggtctcactatgttgcttagattgggcaattctgcctcagtctcccaaagtgctggaattacaggtgtgaaccaccgtgctcggccgtttttcttgtatgattcacactgacatgctgaaaacagcctctgccaccatgaggcagaatgtcaaagccaaaccatcagcatccaaagtatgccatgaggccagtgcatggagctgaaggaacagccatgtggccctgtggaagctgacagcacagctttctgacccgctttctgacgcaggtcagaaaggcagagaaagggcagacagaaaacagccaagccaccgggactggtaatccacacacggcttttagttggatgtgaaattcagagcaggctttgtttgccttgtgcgagaacacatgcctccaagaaggagcctgtgcagacaagcagcttgaggatcgggaaagaactgactctgaaaaggcattttcatttgtcacgtaggtgtcacatgtgggggaaccactcaagacccatgtttttcgtcatccctctttttgcaggtagtgctcagatagccctccctgcactctgtcttttttggattactttccttagaacattgctctctgcacgttcacgtccaattattgttaatccagtcactggggtgatagagtgagtgtgtgaggcattatctgctcccatgagtttgcttactggtgtcctgttacctttttttttttaatgctatatccagaatttggagcttataaagcaagcacaagttaggggttggtttgttctctctatcttaaatctcaagatcagcagtttttgaaatgacctcatgctcgtggtttccaaacctgcactggacttctctggcgatttgtgaacaggagggacatgcccagtttgtgacaggaagtgatgtgactccaggctctgcaaaagattccttcaggtctggtgacctggagactgtagcgttttcgtggcctgaagggtgggtggctgtgctgggcaggcgggatttacctcaacagagcacctttgctttgtccccgtccctcagggagccatttcttcctactacgtccagcgctacggatttcctccaggatgcaaagtggtggccttcactggggacaacccaggtgagtatctcggggagtttcactctccagtgagcctgactgggtccatgctggatgtttgagaattccagtccagcctcttggtgaaaccttctgtggtcattcctcaccacccccacccatgctggatgtttgagaattccagtccagcctcttggtgaagccttctgtggtcattcctcaccactcccaccctgcgatctgactccttgtacctgccccatcttagctccgactctgccctcaggagctggtcagtctgctctctctggatgaaaactgcccaatgattatggaaggcagtcgtgcccaccccatccctaacctgtcttttctgtttcaagatgaatagctcaattcctccaacccttcctctaggacatggttttaagtctctgccctgtcatctgatctgcagcaatgacttgtttctcgtccagacacctcatctccttccctagcctcttctcttcctcctcctctcctctgggtagccctgaagccactcctggaggggcccttggatctctgaaggaaggccaggtgggctacactgaataacaacctaactactacccctcaacctcacccccaccccaggaaaagtaagtctttttctaacgatccaccagattagggttacatttaacagtaactagaaaggttaattttaaccttaatcagaaagattaatttctgtcctttcagtcttctttctgtgctcataaataagcattgtttcttttaatcaacctgggcagtatctttctcattttaacagttgtctagagctcagttgtcccagcatttatttcactggtccctgatggatggagggtggtgttgcttcagtgtttgggcagtgcagacgatgttgagattcacattcggtctcgtctctttgttgttataggataagttctcaaaggtgggattcctagatccaaggcttctgacacacacactgctgattgaacctcagtggcagtgtttgagtgcacctgttcctcactcccatttcacctttattcacatgttgattcactcagcatttagtgagtgcctattatgtgccaggccttccttcagtgctggggcccttcagcaatcaaggcagataaagattgctgttgtgagccatgtgtggtagtgtgcacctgtagtcttagctacttgggaggctgaggtgggaggattgcgtgatcccggagttctaggctgccgtgagctatgatcatgccactgcactccagcctgggtgacagagtgagaccccacctatatatctcttaaaaaaaaaaaagattgctgttgtgggctttgtgtctaaggcagggcacagagagtgaacataacctcacccccttcttttccattactgcctttgtctttctttgctgtatatccttggtgtcttgtcttggcctccttgattctctgcactctcggaagtgcctgacagtggagggatgtttggaccccttcagggaagagacttcacagctcaaatcagcggccctgctaacagagacttcaccccgtgacccctatgaccttctcctcttagggcctcctgagcgctcagctcccctgctcctgcctccaccctagggtgtgggtgggggttggaggtgggggctctgcgcctgcctggagagccctgtggtttgctttgtggttcccatgtggccgccagctaaccagaagctcccctcccattctcagcgtcgctggcaggcatgagactggaggaaggtgacattgcggtaaggcgacttcccacacccataggctctttctgtttccacactcacacccacactctgataagtagcagaggtgctgctgagacccagatcccagggtcccagggtctgggtcccagcaggatctctgctacttatcagagtgtctgccggttccaaaagacagtggagggaggggatgggggcgcacatctttctcagaaagtcattgttctttgctagatgggcaggacccctgcctgcttcacagtggccagtcttagtgcatgcagtggcagagggtcagatgtggggccaaagggctgtgagcagcgcagatgaataaggaagacataacccagacattcctacttctagtgggaaagtcatatggggaaccagccatcacccaaaccattatttagatgcagttgtgggaaatcagcacagaagatccatgagatctgcatctggggagctaactcctggctcatctggtatgggagggtcagaagtggctcttagaaagtggccttgcatctgaggtctgcagcatgagtgaagtgacagggttaaggtgggtggagtacagcgcgtcgctggcagagggcagcgtgtgtgggcaaagcccaaggtgcccacctctgcctatctctcctcaggtcagcctgggcaccagtgacaccctgtttctctggctccaagagcccatgcctgccctggaaggccacatcttctgcaacccggttgactcccagcactacatggcactcctgtggtgagcttgggtgttggttggcaccattccctgggtgaggaggtgtgggcaggtctggcaccatcttgaggaccccaagtcattccactaagctctggaatgactccctccactttcccgggctctgctgggcaactgagacccccaaggactcaccagctcttgctgacagcagagctgggtggggaataacccaagaccctgtgtccttcaagcccaggttcaaattctatcctcaccagctatatcctgtgtgaccttgggcaaactctgtagtgtggcatgtctgagccacactttcctcatgagatggggagggtaagagcatttacctcacattgttactgtgacccgtctggcatgtggtggaccctcagcaaatggcgggaaggacatcctgcctcccgacggctctcatggaagggacatgctctgtgctctgaccacaggcctttggagacctgtccaaagctcctgagggaaatggtttctgagctcctaagccctaagaaccattggagaatgtggctagttaatctagccctccctgcctcattgtgcccatggtagaatgtgcagaaacccaagctccctgtctctacctggggctcctctgtgtcagcctcctgtgtaaacagcccaagacaagggcgtttccggcacctcccagggacattcaggggcctgaatctgaggaagagcctccgatacctaagtttcaaagcctgctgtgcactgactaggggtcgtggtccagcctgacctgcagttcctctgcctgagtctcttcactgaaactcatgggtccagtcagcaagcaccagctccctccctcagagctatgccctcttctgcagctttaaaaatggctccctcatgagagagaagatccgcaacgagtctgtatcccgttcctggagcgatttctctaaggcactgcagtccacagagatgggcaacggtggaaacctgggtaggccagttggtggtgcccaggcctgtgaagggtcagcagctgccgactggaggggcagagcctggggccccatgagctgggggagaggagggccgtggagaagtccaggggagtcctgtctgtctgcacttatattccacacatcctacaagctggtgtggaaccctgtgttctgagcaagggtggggctgtaaggctgtccttggcttctgctctgagcagaacatcaggccatagctatgtcttctgtccccaccaagcccctggtgacagcatcagagagggcagcctctaccctggtgcatccccgttcacagcctctgccccaggcacaaggaaaagtccccagtgtctgggcaggcctgagcagggagggtctgtgcctcccttggtcaaacctgttttgatattttaggattggctgggcagctgcttcctattccaggctgccaagtgagagcaggaagagttgtctttgagaaaagctagctcagggctccctggttcccttctatcctgttggagagaaggaactgagaatattcacaggtctcatctgggggatgaaagagccaggggacccagggatatggggtcattttgtcctgttctaagtctgttaagaagctgatcttttgttttttgactaatgacggctgatctcttcctggttttatttcaggtttttattttgatgtaatggagatcacccctgaaattattggacgtcataggtttaacacagaaaaccacaaggtacatgtgctgttggtgttggagttacattggctccatttgtgagtgtaaaatttaacaattgcctatcaaattatgttacttttagggacttcattcattcactcatccattaatatcatacacacttgtggtgtgccagggtgcattctagatcctggggaatctgcaggacctaagacagacacggtcctttccctcagggaggaatgcagaaaacctgagagttctcttcctatttaacaaatgctaacactatcattgtgtatcacagaacttatttccttggcgagttttatcctatacccatcaagaacccatggatcttgagatcatgaatttcctcctggttgaaagagctgctgagcccaggaggtactaacgtttattgagcccatttggtgccaggcattgtgctcatggttttctataccttcctcatttacttttctttttttttttttttaattttttgagatggagtctcactctgttgcccaggcttgagtgcagcgggacgatctcggctcactgcaacccccacctcgtgggttcaaacgatcctcctgcctcagcctcctgagtagctgggattatagatgcaagccaccacacctggctaatttttgtatttttagtagataggggtttctccatgttggccaggctggtctcgaactcctaacctcaagtgatacgccccctcccaaaatgctgggattacaggtttgagccaccatgcccggctatcatttacttttcaaagcaataggcactattgttcctctttctagatggagaggttgagactcagaggctcaggctaaataatctgcccagagtcacaaggtcatagatggtggagggggctcaaacccattcctctctggctctgaagctgctgttttctttctcctccacaatgtgacctttctcgggaaggatttagttggttcttgctcctcaaaattgacattgctgctggagagtcactggagagtcatcaccacattttgggttgtacctgagagatgtttctgaccccagtaaatggggggtttatgtaagacactctgtctggaaactgtaactgtcagagttggcgttggattcagtggcagatgatggcactacatgttggattatgaatggaaagctttgtataaagtaggaagttcatctcaatcttctgatggaggatcagtttggtttcttttgttagagtgagaagctatgcctgttctctttcatgcatatcaatcctagatttgtcaaggagaaagtagtgttcttcattcattcattcaaccagcagatatgtatgattggtgccaggcaccggggacacaaaggagaacaaaacattggtggcccttgctccccagagcctgctgtctaggagggagagggacagtagacgactgaatgagcatgtacatgaatgcagcaggtgctaaggctaggttgcagaagaacagagtgccgcaaaggaaagcagctggtgggcgggttggagacttaccctgggtggggtgatcaagcctgggcgtctctgagaaggtggcctttaggttgagacctgaaagtactcaggatctcaccatggaaagagtaggatagactttcaggcagagggagcagcttgggaactagaagaaggtcagtaaggttagagtgtagctgtttatgagggggatggcggcaggttctagcattggtctcaggtgccagagaagcaggagtgagcctggggttgatgcccatcagtgctagcttgaaggacatgccacaggggtgggatctcagcgtaagctcgtggctctcacttatctagtatgtactgcattttccaggctctgttgtctaatctgatcattgcaacaaccctaaaaaacaggcgccactattacctctgttttgttaagaaaaagaatgatagcaagactaatgtaacttattgaagattgcagagctgaatggtagacagaacttgaactctcagctgcctgagactaagttctgtaatgtctcttgactctcttcaaagtgacatgcatgtgaggctgtgagcttgtgtgcttgagtagtgtgtttgtgtgagtgtgtgtgacaggcaaagatagtggttaaagagcccagctatgagtttcaaatctgggctgttgtttaaaaagatcacacacagacacacacatacacacacgaatggacaatgagagttccttactctgtgcccaccttttcctggagacaggttgcagcattccctggggatgtggaggttcgagcactaattgaaggacaattcatggccaagaggattcacgcagaaggcctgggctatcgagtcagtaagtgagccactggcagcatgtgtcccggggtgggggctcagggccagctcactcgcaggggccagggctagtggggcaatatctactaaagttttcttacagggggacttgtgcaggagggaggtggagcctgacctcagggatggggtgagaaagtgtcaattggcacttgtaggcaagcatagaatagcagacaggttgttcccgcttctcagctgtgtccacaatagcctgaccttttggccaggacctgtaagacttcggaatggtctttctgaaaccctaagctccaagctgcagatgagctgtcctgagctctggactgcaaagacataggcagtgcaaggtctggggacatgaatggatcttggccttctagcctggccaggtcccattgcctgtgggacacagtctgggtctttcagcttggacagggaagagggggatgtagtaccactgtcaaaactcggaagactgatgtcttagttcattttctgttgcctataacagaatacctgttcctgggtaatttataaggaaaagaaatttatttcttacagttatggaggctgagaagtccaaggttgaggggccatatctgaagagggcctgcttgctagtagggctctctgcagagtcctgaggaggtagagggcatcacatggtgagggagctgagtgtgctggctcaggtctcccttcctcttctcagaaagccaccagtcccgttcccacgataacccgttaatccattaacctgttactttgttaacccatgaatggattaatccactcataaagccctcatgacccaatctccttaaaggtcccatctttcaatatgtcatgttggagataaagcttcaacatgagttttggaggggacacatattcaaaccatagcaactggcatggagagggcagacccagggccgggggaggcaaaaggaggagaaagggatttctgacaacttgagctgtagaataatcagcattaggatgtcagtgagttccccttacaggtggcgttggaatggtctaagggtctgtaaggaggttggactggccgcctatagagtccaggtttctaagatgtatttgtctctctgggctatagctgttgtcattagagaagatagtgaagctgctttgcttgagggccttcctatgatactctatggacaatccaagttctatgtaatatatattttatacctttgaatcaactgagtaaaaggatactataaaaatacctattagggaaacctcttagaaaacctgttagacagcatctgctaaagctgaatatacgcctacccagcaatctcatttctaagtaaaggcacaacaggaatttttgcatgtgtttactaaagatgtacaggagaacattcattgcagtactatgctgaatagccccacagtggaagtggcccagtgcccattaatagtagacagaaaaaatgcattgtggtgcatttgtacaacaggatactacacacaaatgaaaatgaaccagcctcagtgatccacaatgaaatgggtgaatctcaccaaatgtaacactgagcaaaagaggccaaacatggacatacatatggcaggggtctctgtacatcaaattcaaaagcagatggcactacaggccaggcacagtggctcacacctgtaatctccacattttgggaggccgaggcaggtggattgcttgagtccaggagttcgagaccagactgggcaacatggtgtgttgcgggaagtcagggaccccaaacggagggactggctgaagccatggcagaagaatgtggattgtgaagatttcatggacatttattagttccccaaattaatacttttataatttcttacacctgtctttactgcaatctctaaacataaattgtaaagatttcatggacacttatcacttccccaatcaatacccttgtgatttcctatgcctgtctttactttaatctcttgatcctgtcagctgaggaggatatatcgcctcaggaccctgtaataattgcattaactgcacaaattgtacagcatgtgtgtttgagcaatgtgaagtgtgggcaccttgaaaaaagaacaggataacagcaattgttcagggaataagagagataaccttaaactctgactgctggtgagctgggcagaacagaaccatgtttctcttccttcaaaagcaaatgggaaaaatatcgctgaattctttttctcagcatggaacatccctgaaaaagagaatgtgcgcctgcgggtaggtctctgaactggcccccctgggcgtagcctgtctcttatggttgaggctgcagagatgaaataaactccagtctcccatagtgctcccaggcttattaggaagaggaaattcccacctaataaattttggtcagactggttgatcccaaaaccctgtctcctgataagatgttaccaatgacaatggtgcccgaaacttcattagcaattttaatttcacctcggtcctgtggtcctgtgatctcaccctgcctccacttgccttgtgatattctattatcctgttaagtacttgatgtctgtcacccacacctattcgcacactccctccccttttgaaaatccctaataaaaacttgctggtttttgtggcttgtggggcatcacggatcctaccaacgtgggatgtctcccccagacacccagctttaaaatttctctcttttgtactctgtccctttgtttctcaagccagccgatgcttaggaaaaatggaaaagaacctacgtgattatcggggcaggttccccgataatggtgaaaccccttctctacaaaaaatacgaaaattagccaggcgtggtggcacatgcctgtagtcccagctactcaggagactgaggtgggaggatcgcttaagcctaggaggttgaggctgcagtgagccatgagaccctgtctcaaaaaaaataaaaaaagcagatgaaactatttactattgttggaagtcgggataattagtagttacctttcagaaggggcctgtggggtgctgtcaatgttctgtttcatgttccatgggtgtgtttagtttttaaaaatttatgaacattataggcttatgatgtgtgcatttttcaggatgtgtgttctaggtcaatacaagattttaacatgtgtaaaatgaccaccatgagcattctgattgccctcatcccaccaccctaagtgtaaaaagacgtttcctaaaggtctgcaaagacttccaagttccctgaaaatgagactgggtgagcagggcagggttggtgctggagttggtggagtgcctggcaggggtcctccggctgtcagaagagaaccccagggaacggaacagcccagcatacagggagaagcagttagggcaaaaggcccccatgggctcaggaggagctgatgggattgtggcattattcccagcctctaaggcatttcttgtgcaaaacagcatagagttacttatcctcttagcaagcttaaatgcagaatcagacctgtcttgccgctctgctgagtgatcacttaaatagacatacttggaaccaacagaggttgcacgcacgtgaggactcattctccaggctgctgtgtggactggccagctctttcgttcttgcccagacatcatctcatttggctttaatagtgtctaagggcaataaagaggcactttgaataaaaatgattattgtgatactaacagctgccagcatttgttgggcactgagtgtgtgcccggcccagttccttagcaattaatctttattaacaacagtaccgctgaagtaggtactgatatgattcccacttcacaaccgaggaaaccaaatcttgcagtggttaaataacttggtcagggctggcagagctgggatctgaaccaagccagtctggctccagatgctggattctcaaccactggctgaacctgctttttttaaggaacaatcgccctcttgatgtttatagacaccatcagacatgatagaaaccagctgggcagggctaataagccatagttttcagtttatatttcagtgtgtttcatgttgtttaggttgattgtaaaaacagtcaaatcttgtaataacaagtttgaaaaataaagaaaatgggcctggtgctcacacctgtaatcccagcactttgggaggtggaggcgggaggatcacttgagcccaggagtttgagactggcaacagagagaccatatcttcacaaataataataattataaatatcccagtatagtggcatgtgcttgtggtcccagctactgggggtggggtggcaggggtggcaggaggccggggggatcgctggagcctgggaggtcaaggctgcaatgagctgtgattgcaccacttcactctagcctgggcgacagagcgagaccatgtctcaaaaaaataaaggaaaatgactcataatcccatcccctctctccaaccactggtatcatttagggacattttctcccagtctcctttatgagcttatttccatacagccatagttttgttcctttgtaccttatatgcaaagggtgtatacaagaaccaaagtttgtcagaagtcatctttgtggtgctgcgtatgatggccaggttacttttcctgcatttgggcactgagggtgttcttgttttttttgtttgtttgttttctttgttttgttttgttttgtttttctggagacagggtttcactcctgttgcccagactggagtgcagtggtgtgatcttggctcactacaacctccgcctcccgggttcaagtgatcctcctgcctcagtctcctaagtaactgggactacaggtgcacaccaccacgcccagctagttttgtatttttagtagagacggggtttcaccgtgttggccaagctggtctcgaacttctgacctcaaatgatccacctgcctcggcctcccaaagtgctgggattgcaagtgtgagccaccgtgcctggccattgttcttggttttccaacgtggaatcacactagagcatcttccatagcttgaattatttccccaggaggatggcagtccttctctcttcccagacactgtcttcacggccagcgatgaagatgggagaagctgagaggtgggggctgaatgtcttcttctggacagagccaaggggctggatggaaagcagcaggtcttaaaaacaactatttgttttaaaatacataacgaatggatgtctttttatcacaaaagattcatgcaaaacagaaatatggaataagaagcaaatgcccccttcatttgcctcccagactcctttccttctttccagactgtgacttccttcctgtgagtttctgtgttagattgaatcatacggaattgccaatattgaagaagttttgatttacaaaaatggcaatttcatatggttcgacctgacacgtgtgtgtgtgtatatatttaacagaaatgctattacattctatgtgttattctgagacttgctttccataacagtatgtacaggtctacctttttgttttctaatgactggcatgaggtctgataaattattttatagccctagttgaaggacattaagattatttcttgttttgttttgtttttgtttttgttcttgttttgagacagagtctcactctgtcacccaggctggagtgcagtggtacaatctcagctcactgcaaccttcgcctcccgggttcaagcgattcttgcacctcagccacctgagtagctgggattacaggtgcgcgccataccacctggctaatttttgtatttttgtagagacggggtttcgccatgttgcctaggctggtctcaaactcttgacctcacgtgatccactcatcttggcctccaaagtgctgggattgtaacctccactttcaccatctcattctatgccctatacccttgtccctagttcattcttgtttgtgtattttttttcccttgagcatgttagctaaaggttggtatattttattaagcaatgttaatattttgttttgtgctcccttttattaatttctaattttatctttttaaatgctttccttctactttatgaattttttctttttctgtatttttaagttgaaattttagctcatttattcctatcctgtattaacttctaatttatgcatttcagaatgctacatgttaactttatttacataacatatctttcatttctaaaaagatagtaattttcatctttttctgcatcagtgagtggtccttcaaactggcccctcgtccttttgacatatcttccatcattccttgagcatttccatagcttctagtataaaaaaagtttcaggctcatcttgttttttccttggatcagccttgtaatcttccatttatccaaggggccctgacttctctgagtgggagagatgtttggatgctctctctggatgctcattgctactgggatgatgctgttcccagcccctttcagtgggctgagctgggaatatgtaaggatatataacaacccctttcagtgggctgagctgggaaatattaggatatatatatacatatccaaatatatatatgtctgtatcaatacacacgttacctttctatttgtctgtctgtctacttctccatgtgttgaaaaacatgagttcaaccctatacactctacttccagtccaacaccatggggttcattctggctttcttccttcccatatttgtatcttatcctaacagtgacaaagttgattcttctgacccctccagattgctgcctccttgacatgcaagccccattttggcttctctgcttacccttacctgtgttgtctctgtgtcgtctctccagcagcctcttgaatctgccccactctggttatgtacttacatgtggcccttgagccacttctgtttgcctatttaatggctttttagagaaggaagaagaaaaaagaaaggtaggaaggtagacaggcaataaatatttttaaagggaagggtccatttacatttaatgtaattattgaaatgattggatttaattgaatctatccatttattttttatttttttaatccatccatttacaaaatggattacatatcaatttttctttttcttttcttttgttctatatgttcttttttctttcttattcttttcctgtcttatttttggattaactgagcaatgtctagtattccattttatctcctctgttggctttttaaggtatacactttttaattgatttttaaattgaaatccttaatttgaaaagtctggtttgcactaatattatacacttgaattttttacgaacatgcttgcactacaagaatgactaaaggatgtcttccgggctaaagggaaaatcataccagatggaaagtcagagcttcaggaaggaatgtagaacatctataaaaagtggattctcttaagttttactttgtctgaaaatgtatttattttacttcatattaaaataatgttttctgctgtggaattctaggttggcactttttactttcagcactctgaaaatgtcatttcattgttttcttgacttctaatgtttcagataagaaattaactgtcattcttaatgttattctcctgaatgtaatggggttttcttctctggctgatttaagatttttctattaatctttgattttcagcagtttgattatgatatacctaagtaagggttttttaattattattttgtatgtatcccctttgtgattcactgagcttcttggatctgtgggttaatgtcttccatcaattttggaaaattcttagccattatttcttcaaatatttatttttccctattccctctttcctttcctctggacttcagttacacatctgctgttgtcccataggactttgattttctattcttttttttttttctctctctccctgcttcagttggacaagttcattttttgttttgttttgttatgttttgtttttttgagacagagtcttgctctgttgcccaggctggagtgcagtggcatgatctcggctcactccaacctccacctgctgggctcaagcgcttctcctgcctcagcctcctgagttgctgggactacaggcaagcgccaccacatctggctaattttttgtatttttagtagagatggggtttcaccatgttaggcaggctggtcttgaactcctgacctcaggtgatccgcctgcctcagcctcccaaagtgctgggattacaggcatgagtcactgtgcccggacttcagatggacaatttctatcacacctctttttattcatgtttctgctgtagacagtctgctattaagtccatctaacaaattcattttggatattatattttttctatttctagaatttccatttcattctcttatactttcttatgtctctgctgaaatttttcatattttaaccattttgtccatctcttcctctgactttatatcatctttataattattataaagctcctatctgctaattcatctcagagtctgcttttatttactattttactgccatttcctgcttcttaaaatgctatttaattttgtttgaatgctgtacgttgtgtttaaaagtacggtgttgactaaagtggctaatttttaaaccttttacttttgagataattgtagattcacatgcagttgttaaataaatagctaatgtttacctgcagaaaaggcttgcccttctatcaggaagtgcgggtgaggtggtggtttttttttgttttttttttttttttttttttacttttatcatttaatttttatttttaaaaatgtatatagtaaaaaagctgggttgcggagatgtcggtcagtggattaaaaattttggttagggtacaggaacatattcaagagatttattgtacaacatggtgatgatagtttataacagtgtattgtattcgtcaaaattgccaagagattttaggtgttctcaccacaaaagataagtatgtgaagtaatgcataagttaattagctcaatttagtcattccacaatatatacatatttcaaaacatgttgtataggataaatatgtgcaatttttattgtcaatttaaataagtaacaaaataagtaaaaaaaagtctagaagcctatataacagcatactaacagtgtaactctggtgtaactagggttggtttttactttcttcattttgtcttttctaattttttgtatagtaacttttatcactgggcttaacaggaatctaaaaaatgtatttttagcaattgttatgttatatccacaacatgatctatatattttgtcagggaggtttattttttgactcagaactagtttgttcttgaaatatgtactttattcttttaattagggcttaaaatgttaaaatatttctaaagaggactattttgggactctacagtgtacctctttaatgagaacacccacagtttaggcctattaaggcatacttcctttattttactaaagaattaaaataataaagatttgataattttctttcttttttttttttattgatcattcttgggtgtttctcgcagagggggatttggcagggtcataggacaatagtggagggaaggtcagcagataaacaagtgaacaaaggtctctggttttcctaggcagaggaccctgcggccttccgcagtgtttgtgtccctgggtacttgagattagggagtggtgatgactcttaacgagcatgctgccttcaagcatctgtttaacaaagcacatcttgcaccgcccttaatccatttaaccctgagtggacacagcacatgtttcagagagcacagggttgggggtaaggtcatagatcaacaggatcccaaggcagaagaatttttcttagtacagaacaaaatgaaaagtctcccatgtctacttctttctacacagacacagcaaccatccgatttctcaatcttttccccacctttcccccttttctattccacaaaaccgccatcgtcatcatggcccgttctcaatgagctgttgggtacacctcccagatggggtggtggccgggcagaggggctcctcacttcccagaaggggcggccgggcagaggcaccccccacctccctcccagacggggcggctggccgggcgggggctgaccccccacctccctcccggacggggcggctggccgggtttttttttgtttaatcaggggttggatcagtactagttagttttagttcaccagtagttgcagtgtcttgggatcaggatcagcaggatcaggcccctccctccatcaagtctttgggacctaaccactgagattacagagctctttctctgttttccagctcttcccccacttccacatcactgcttccatagtagttcactggagacatttggtgggtagggaggactagctctatattggagactcttccagatttcagtcctccataccagcccaaatgtagttgtttttcttttctagcaaattttatctgcctgtagagtcttacttcttcatgtctcccatgctgcaggtatgaatcagcacttaagggctcatctcattctggaatttattttatttagacttcttgaatttacaattttttgatagcttcaagcaaaaatatgatgctctggttgttgttgtttattccattctgtcattgttacagcacaaatgtgttctttcttgaccatcatcatcttagctggaagtggaactatatgtcttttattagattaaggtttattattattttactatttatttttatttatttattctaaaatggagtttcacttgctctgtggcccaggctggagtgcaatggtgcattctcggctcactgcaacctctgcctcctgggtttaagcaattctcctacctcagcctcctgagtagctgggattacaggtgcccaccaccacacctggctaagttttgtatttttagtagagacggggtttcaccatattggccaggctggtctcgaactcctgacctcaggtggtcttcctgcctcggcctcccaaactgttgggattacaggtatgagccactgtgcccagcctattatatttttttggagacaaagtctggctttgtcaggcaggaatacacccaggctggagtacagtggtgtgatcacggctcattgcagccttgaattcctgggctcaagcaatcctcccacttcaacctcccgagtagctgggaccacaggcatgcatcaccgtttccagctaatttttgtattttttgtagggacagaatctttgttgtccaggttggtctcaaattcctgagctcaagcaatcctcctcctgccttggcctactgaagtgctaggattagtaggcataagccactatgctcagtcagtttattgtgaaaaatatcatgtatacagtagagtatatgtatcttacagcaagttataaaacatattaatcaaacatctgatgatcagcactcgggttaagaaatagaacatcagccaggcacagtcacttacacctgtaatcccagcactttgggaggccgatacaggcggatcgcttgaggtcaggagttcaagaccagcttggccaacatggtgaaaccccgtctctactgaaaacacaaaattagccaggcatggtggcggacgcttatagcctactcaggaggctgaggcgggagaatcacttgaacccaggaggcggaggttgcagtgagccaagatcaccccattgcactccagcctgggagacagagcgagacttcatctcaaaaacaacaacaacaacaacaacaaaaaaaaagaagaaatagaacactagaaccttggagtcttgctgtgctcctcttccactgtatcctcatcttcccctcatccctgcagagatcatttctatccagatttttgtattataatttccctggaattctttatggttttgccagctgtgtatgcattcctttaaatacattgtggctttttgccctttctgaacttcatgatacatggaattatactacatgcggtgtgatttgctgctttagatcaacgtcatgtttatgaattcatccatgttaatgtgcatagatagctattagctgttaattttcattgtactgtgatattccatcacatgattatacaaccatttatccatttgctatgacctgactgtgtctccccaaattcacatgttaaaaacttaatccccaatgtgacagtgttgggagatgggcctgatggaaggtgtttaggtcatgagggctcttgtgtattaatgccactataaaagtgctttcaggagtgagttcaccattttctgcttttcagccatgtgaggacatagcattctggggattctgctaaacattctacaatatacgggacgatccctcacaaaaagaattatccaacccaaaataagcagggttttattctggttggaagaggaatcaagcttttttctgtgatgagtagagctactttccatgtttgtctccatgcctgctgtgggagctcagtgtcatttcaagttcctcttcactcagtccccccatgcaccctccccagctagtagcccactttcactaatgagcacttctttactttagcttggggacaaacactgctgctgcttctgctgctgagtgtaagggagtggagggaagggtcttgagacccctgctgtcatgaagtcagttgtgtactctcagcagcagtttatgagggttcttattttcccatatccccaccaacacttaacagcaacaacctttaaatctgttgccagtctgatgggtgcaaactggtatctcagtgttagtttaatttgtgttttcttaattaacgatgattttgttttgttttgttttgagatggagtttcgctctttttgcccaggctggagtgcaatggcgcgatctcggctcactgcaacctccacctcccggttcaagtgattctcctgcctcagcctcctgaataactgggattacaggcgcacaccaccatgcccagctaattttgtatttttagtagagatgggatttcaccatgttggccaggctgatctcaaactcctgacctcaggtgatacacccgtctcggtctcccaaagtgctgggattacaggcgtgagccaccgtgcctggccaattaataatgattttgaacagctctttgtaactctggtttctttctctgaattggctatgtacattctttcccatttttctatttgatttcctatctttctcttattgatttgtaggattttattgtatactttgaatattaggtttttgacagttttttgtgttgcagatatctctcatttatctgttgcttatttatagtgtcagcaatttaacagaattttgatgaaattcatcaatttttcatcttccattttatgcttttgagatattgtttaagagatttccccccactccagtatcacagaagtactgttttatgtttctcctgttgatgttacaattttaccttccacatttaggactttgatccatctgaagtctttgcgaatgatgtaacttgggatccaatttgattttttccacatgttgatccagttttccaaacactatttactaagtggtctgttttaccccattacttgtagtgccccctttatcatttatccagtccctatatatacatgggtctttctctgtactccctttcattttttttttcctttttttggagacagggtctcactttgccgcacaggctggagtgcagcggcgcgatctcagctcactgcaacctccacctcctgggttcctcccacctcagcatcccgagtagctaggactacagacaacgtgctaccatgcctggctaatttttaaatagtttttatagaaacagggtcttgccatttttcccaggctggtctcaaagtcctgggctcaagcaatctacctgccttggcctcccaaagtgctgggattacaggcatgaaccatggcacctgacctgcactcctgtttctacttcatgggtttattggtcttgttcttggggcagaaaaactgttgtattattgtggctttgtagtatgtcagtattagttggctagggctgccataagaatgtgccacagaatgggtggcttaagcaacagaaatttattttctcacagttctggaggctaaaagtctgcgatcaaggtgtcggcagggttaatttcttcttaggcctctttccttagcttgtagatggtcaccttcttcctgtgtctccacatggtctcctcctgtgtgtccctgtgtcttcattttctcttctcataaggacatcagtcatactggattagggcccacccctaatgactttatttttaacttaattacctctttaaagaggtaatatctgtctttatcttcaaatacactcacattctgagaaactggggtttaggacttccacatataaatttagggtagacacacttcagcccataataatgttttaatatgtagtatagcaattatcccctccttgcttttctttttaaaatattgtctgagctgtttataggtcttcatttttccacaaatattttataagaaattggtctagttccttaaaagagtccagctggaatttttatttaggttgaataggatgtatacattaattggaaaagattgacatatttataatgttaattcatattcattcaagaccatggaatatcttttaatttatttagatattcttttttgtactttaacaacaatttcaactttttcttaatagagacttttgaattctttgttaaggtattcccttacatgtaagtctaccttacatttctggttgctgttgtgaaagttaatttatatattttctattgtatttgatagttgattattattagaaatgccattgattattataagttgattttgtatctggcaaacttattaaactcttgttagttttattagtttgtttattctttattttttccaaatagatggactattgtctgcaaatgacagttttcttttcctttatttcaatacttatatattttagttgtttttgttatcttatggcattgactggtagatctaatactgtgttaaacagtggactggatactgtgaatctttgttttgtttgtagttgtattagttatctattgccatgtaacaaattatctcaaaatttagcagcttaaaacagtaataaatgtttattctcttatacagtttctttgggtcaagaatttggtttcagcatggttgggtgattctgattgaggatatctcctgaggttgcagtcacaatgtcatctggggctgcagtcatctgaaggcttgactgacgctggaggatctgcctccaggctggctcactcatgtggctgttggcaagaggcctcagtctcctgccatgtagacctctccctagggctgcttgagtgtcttcaggatgtggcacttagctttccccaaagtgagtgatccaagagagcatgatctgtgtcagagcgagatggaagcctcaatgtcttttatcatctagtcttggacttcatacttcatcatttacacaaggttctattgggtatacaagtcggccctattgaatgtgaggggggactacttgaaggtgtgaatatcaggagggagggattatgtggaggccattttggaatctggctgacacaccagtctgaaagaaagtgcttctaaatctctgttaagaatgacatttgttataagttgtggatatatgacttttatcatttaaggaagttcccttctcctgttttgttgagatatttaaaacaaaaaaagtattaaagacagttaaggtgggtggggcagcaaccttacaagcaaatgaatgtgacaggcctgcacacacagagccagctttggatctctcccgtagtcctgtgtgataagtgggaggcattggcccatcatgagccctctgtagctgaagaactctgcaaaaacagccctttctgccttgggagaactggcatagctattttacttttttcttttcccttgcagtgtccaagacaaagattttggccacaggaggagcatctcacaatagagaaatcttacaggtaagcgttagtagtgggccttacaccatggcctctcccatatctgttatgtctaagagccagagactggataggaaggacagcctccattcccactcctgcaggaatggggagctcttagctcacactccaggaagcagctctgttgccttacagctcacactgtgagtgggatctgtctcacatgcaggtgaattctatggctgtgtacaatccactctctgataccagcactgtcctctggagtcacatggaaagtgcctgttcttccacatggcaaaccttctcacatctagtgccagtgttcttgtcttcctcaaggcctctgccttccaatgtaaccatcgctgattctccaaccagtcctcttataacacagttgccagactgttactgtccttctggtccttcattatgccagaaacatatgaccaaaagtagaatcaacctgcagatgtctgacactcagactgtcacctgtggggctgtcagagcctgttatggagacattgtgcatttttgggtgtagcctggggctgccttaactgttagagtaactgtattagctgtttgcttgtgactacctatcttaggtaagatttttctagaaacagagcctgaaatgggaattcttctataagcagtttgttgagagagtactcccaggaagaaggaagtgagggactcagggcagtgcagaggaagaaggataagtgaggatatggtcttgtctggagtctacttcagctccatcctggtggggaggtggggctctggaacatgaattataccacagagctgattttaccttgggacaagggggccaacaggccaccctggggaggttaaatctcctgtgagcggtggcctatgctcagccaaggtcagctttcttgaggaggtagtgctgcaagccattagtagccagtactcacagcagctggggcaggatgcacaatggtccagtgagggggatctgggtcggcatcagtggcatctactacaatatctctggtcaactaagacctcccccaagttctttccatgtgaactcctcttagtacaggtcctccatttgaaatgtatgcaatttatttgtgaacctaaatgggaaacttcaccattatgcccatgaaacatgctcttgttagcttgggtttgtttgggcttgttaatgttagtctaatacccagctgtctccagccctaggtcagtgccatttgctaaacatacttcctaaatcttctgccttgtctttggtgaaatggctaaaaagtacagggacagcctggggagctgtggctctccactacggacttcccccagctcatcctgactctattatcaccagggtagcatgaccaagcatactcctcttaaggcagtcgaggtggaatggaaggggtcagaagacatatgagggagagagcctggaaagtgcatcccacaatgtctgtgttccctctgaggaatggctcaccacagtagaacctctgtgtccttttcaggtgcttgcagatgtgtttgatgccccggtgtatgttatagacactgccaactcggcctgtgtgggttctgcataccgagcttttcatggtaggttgatggagggagacagctatctctggaagtggccaggacatggggtgggctgaggagggtggaaaggggagagtgaggtgtacccagtctttggggacattggagtcttggggacttcagcttcatttttctagctcccagcaggtgagaaccaacccatactctctgttcctttattctttgcttaaagtggagaaaaagaggctgggtcctaactgaatgaggtctggtcagagttaaggtcagcacagggacatgggaaaagaacacagggcatggttgagagcacgtgggcatgagtctggacagctagagggcaggagaggtggacaaagtccagagccgtcttttcagcaagaacagaagttgaaacaaaggggaaggcttcaggcccaagcagtccaggaccctggacagcaccatggagccctgttgccctgttggaggcctcgctaaaactctgggtattaagggaagctccccgatctaggcgagttctggcaggagcagcacctacctgcaagggcagtccttcaagttggatcaatttgctctgtctcctgcttgctcagggagctcctgtagcagcccaggtggttctattcttttcatattcttaacatttaacatacctatttcagcttatatttttcttttcttttttttttttttgagacggagtcttgctctgtcaccaggttggagtgcagtggtgcaatcttggttcaatgcaagctctgcctcccgggttcacaccattctcctgcctcagcctcccgagtaggtgggactacaggtgcctgccaccatgcccagctaattttttgtatttttagtagaggaggggtttcactgtgttagccaggatggtctcgatctcctgactttgtgatctgcccaccttggcctcccaaagtactgggattacaggcgtgagccaccgcacccggcctaagcttatgtttttctatcaacgttgagaattaatcaggcaacatatccttctctcaataattaaccttggccgggtgtggtggctcatgcctgtaattccagcattttgggaggccgaggcgggtggatcacaaggtcaggagttcgagaccagcctggacaatatggtgaaaccccatctctactaaaaatacaaaaattagctgggcatagtggcacacacctgtagtcccagctactcgggaggctgaggcaggagaatcgcttgaacccgggaggcagaggttgcagtgagccgagattgcgccattgcactccagcctgggtgacaaagtgagattccatctcaaaaaacaaaaaaaaataattaacctcttactcatttattctctccccaccccatctacctcaccctgcctcatgccatatcctatatcaagatcacttgggaatttatttccagattcttatattaagtacatttaatattatattggcttttattcacacttacctatgagtctgcctgcctgcctgcctgcctgcctgcctgcctgccttccttccttccttcctctgtttgttactttgtcttttttttttttttaacttcctgacatttcggttgggtgcagtagctcacgcctgtaatcccagcactttgggaggccaaggtaggcggattatgaggtcaggagatcgagatcatcctggcctagagggtgaaaccccgtctctactaaaatacaaaaaaaaaaagaaaatagctgggcatggtggcgcacgcctgtagtcccagctactcgggaggctgaggcaggggaatagcttgaacttgggaggcggaggttgcagtgagctgttgcagtgagccgagatcgcaccactgcactccagcctggcaacagagcaagactccatctcaaaacaaaaaacaaaaaaaaacaaacttcttcttctttctcctttatttctatgctgaggttttgttttgttttgtttaagacaaggtctctgttgtccagcctggagtgcagtggcgtagtcatggctcactgcagcctcgacctcctagactcaggtgatcttcccacccccacctcagcctcccggatagctgggactacaggcacacaccaccacacctggctaatttttgtagatatagggtttcgccatgttgcccaggctgaactcgaactcctgggctcaagtgatcccacccacttcaccctcccaaagtactaggattacaggcatgaatcctagtgctaggattaccgcacccaggctgtatggtagttttgttggaatatacaacctaaataaatattttaagagagaattcaataggtgatggttttgaggcctgacatgtccaacaaggcctttgtttcatcctcccaaatactggctgggtaaaagactctatgttcaaaatacttttcctgagaactgtgaagatactcttccataatcttctggccttcagggttgctgatgagaagtatggggtctgcttcataattcttttgtggaagtgggaaaggagtttccctttagggacttcactgccatcctgcactgtgttttgttttattctttttccctttctgtgcttgccaaagggtacctgggccactgccctgctctgccctccaaaaccaaagcccgagccaaatcttagctcaccagtccctacccagagggatactaaccacttcatttggagatatcttctccccatctgggtctggggatgactgtcttgtgtagccagtctgcgagtatgagtggagatggaaccagagtcttttgattagtttctctgctgtccaccccaccaccattccagtccctcatccattctgctctgagctgggattttctagcatttggttaggaaaactggtcctcacatcttcagagggcccttcttcactcctggtggtggtggtgtttgtatatctgacgctactacctaccttccctagaaattgctcattgtttcttgcccaccaatggcaaccttccccctgctactcatttgcttggtgagtaattattgagtgccccctgtatgccagatggtgtgctaggcaccatggttatagtggtgacccggagagacacagtatctggcctcgtggactttacagctcagcaaaagagggatcttaaaccaataatcactgaaatatatgggcacaagttgggaaaagtgctctgaggaaaagcagatggtgctgagcgctaaggagggcctcctgagcaagtgatggtcttaggtgcatcttagctgaggagaagggaacaggcatgtgaagagtggaaagaacattccatacagtgaaaaggctctgaggcagaatgagtggagagaagaccaggctgtccagaatgtggtgaacgaggggagagaggaggggcaggcagacccttccccatcatatgtcgaggttacccgacctattccatgaaaggcacaaccacaaagagaaagacaagctgggtcctgctggagacaagcctgcacttgccatttttttgttttgttttgtaattttattgaggtacaatctatatgacataaaaatcatccattttaagtgtccaattcattgatttttcataaatgtactgaattgtgcaaccatcactataatccagttttagaacagtttgccaccccagtgagatccttcgtggtgtttttggttaacgtcttcacttgcaacatgcactaatgtgaagtgacctttcccttctaggtcttgcaggtggaacagatgtgcccttttcagaggttgtgaagttagctccaaatcccagactagctgctaccccaagcccgggagcttctcaggtgagagaccatcggaatttgtttgtagcatttgcattatgaaagcccgctagggttttttcccccaccaaaaggtcacctacattgaacgtgatgtgctcaactaaaggagaaattctgctttattgaaattatcaagaaaatggagctaaagggccatgttgtcagctgcaagtcacagatactgctgattttacagccagggtcagatggattgctgggcatatttgtattgcttcttatgcctcacggtgggcccttccatgtcactgggctataaaagctactgaaaggatccatcactgaaattcaagacatgctgggtttctagcactgaaatctcaagtctagacccaagatagctgtgcagtcacccaggccaggaaatccctgtgaaggcagacctcacttgttgcaggttgggtccctcagaaagcagagtctgagatgtcaactaagatatatgaggtttatgggagtcgggggagttgctcttggaatccacaactgcagaaaggaaagggagtagacaggattggacagagggagaaggtgagcagcaatgcaatttctggagcctaagctattcctacagaaagctccgaagctgagatgacctttagagttttacccagttggtctaaggggctgggcctttataccccatgtcaatcagtcatcacatgtgggccaccccaggatggggtgaggcagctctttatagctaaagcagtctccaaagtgggctgtcagctgagggctctctgccaacagcactcccatcagttgggagaataagttcttcattcccgaggtgaatctggatggcacaccatagcatccgccacaccactgcacctatttacagaagggtctggcagcccagcagcaggggtgggtgcatcttgtaaggaactgtgaagggtctgagatttacctgacttgcaagctaacaagtgagcctgccaccattttgtagcggcaggcagaagacacgggactcctggatcagagacaaagggctttattatgatgaaccatgatgaactcatggttcatcaggaagcatgagcttcatgcttgcctcattttcccttggcccccaaattccacagggtgatgcaaagtgggcccaggtggatactggcacataatagtctgtgatacaactaaatgatcccgagcatagaaaactcccaaccttgtaaagaaactgcgagcaaacctgtctaaactttgccaccaaaggagacattatcctttttattcttgtcagcaaacagataaacattctctccagtgtctctgccctggagagagacactatctttatgtctctatactttacaaacatccttgaaaagatggtctgaaacgaaagctgtcataagacatgtagaaacactatggagaattgtctcccagcatatcttggaagcaagagctcatgctgtctagagcagacaaaccacacacataggtgtgcccaagcatctgtaatttttctgtttgtgagaggctatttttctctcatgttcgagaggccactcgatacactggaaagattcaatgtcgagataaaggacatttaagttctgattcttattctgcttctccttcaccatgagaccttaagcagcactccttgtctccagacctctgtttgtttatctgtgaagtgggcacaccatctgtcctgcctccctttaacttgctaattgtgaggcttaaaaagaatccttgaccaaaatggctttataatctaataggaaatctgggggtagaattggttcagtggttcaacatgagaactctggtcatcttccctgcaattccttaggtcagcagtggacaatgggaacataatgtgagccacatatgtcatttaaaatattcggttgcctcattttttaaagtaaaagtaaaaataaaaataaatgattaaaattaattttaatacattttatttaatccactatatctgaaatattgtcatgtcaacgtgataaatttgaagttactaatgtggggccggatgcagtggctcacacctgtaatcccagcactttgggaagccaaggtgggcagattgcttgagcccaggagttcgagaccagcctgggcagcatggcaaaaaccgtgtctctacaaaaaattaaaaaattagctgggtgggtatgtgcctgtaatcccagctactcgggaggctgaggtgggaggattacttgagcccagaaggtggaggttgcagtaagccaagatcacaccactgcactccagcctgggcgacagagaccctgtctcaaaaaaaaaaaaaaaaagttactaatatgatattttacatttccttttttgcatgaagcttttgaaatttggtgtgcatttaacacttatagttctgggcatgcttcaagtatgcaaaggtatacatggcttgcagctactgtattggatagtgcagctctggatgtgctccacatggtgacaggacagctatagctgccccaaacatcatgtcttcacagctgtattcgaaggcagggatcagaaggtgacattgggcagagagtctctcctcacacacctcttgctcatcagggagaaaaatactggcctatccctcccctatcccacacacgcccaacaggctaccacttggtcatatggtcaattctggttgtaggaaagtctagggtagggtctggctctttcattctatctagaaggaggccagcaaggaggaagataactggggaaagttttagggcagcacagcagcgtctgcctcatctagagtacggagtggccaatcctctgagctgtatgtgcctcatcactctccctggcctgcccatggccgaaatcactgacaactcatggaaccctttaccattggatccaaatgtaacctcaaaagcccacccaacagcaggttgcaagcagtgacagtctatatgattgtcagcgtatgtgacttatatgcagactgaatttgtggactagagttaaacttcttgagagcagggccacatccttcattctctctgtggcacctacagcactgcttgtgctcaaggggaaactcaaagcagtaagaatgttttctcccttagctcagctgaacgttgcagtttctccatgaggagaaatcaaagccccttagctttgttctctgactccttaatgtccaatacaggctaggacaaccttaggcccctcgcctgtgggcctctttataaagggtcacctgttatcttttgctttattttactcatggggtctattcccaagtacttcacaaacacataattcacagggtagaaccagaacatcagctgtgtcaccctcatttggaagagcaaaggaatttatctccctaagcccttctaggcagcacagacttatcgtggactcagaagccagcaggctccttctctctggctctgacaccctgtgtaactgtccctgagccttctcagacagagctgctccagctgcaccaagagtaggccccagttgcataatcagttgttaaaatacttggcttccagctgggcgtggtgactcactcctgtaatcccagcactttcggaggccgaggcggatggatcacatgaggtcaggagttagagaccagcctggccaacatggtgaaaccccatctctactaaaaaagaaaaaaacacaaaaattagctgggtgtggtggtgcacacctgtagtcccagctacttgagaggttcaggcacgagaatcacttgaaaccaggaggtggaagcttcagttaatcaagattgcaccactgcacctccagcctgggtaacagagtgagaccctgtctcaaaaaataaaaaaacaaaacttaactttggagcaaattaaaccaaattaagaaggaatggggttggcatgagctcctacttgtgtttacttgcgagtcgcaggaaaatccgggtccttggtcttgttgtttgtctgtaagacagcgtgtgcttgcctgaagtgcatctgcatttctcaggtaagatggacagccacagggaaaactgcttagggggataaaagaagagtaagaatgtggggttgtgtttctttttggtcttttttctctgttgggctttttgtttatttattttggcttataatgcagcacattgtatatataattttgtagcttctttaaaatttctacattacaaaataaatatttcattcttaaaaatgtatgtgcataccatttttaatgactgtataatattctatctgggtagaccaggcacggtggctcatacctataatcccagcactttgggaggctgaggcgggaggatcacttgaggccaggagctggagaccagcctgggcaaacatgagacctcatctctttaaaaaaaaaaaaaaaaaaaaaaagctggcagccaagatggccaaataggaacagctcgggtctacagctcccagcatgagcaacgcagaagacgggtgatttctgcattttccatctgaggtactgggttcatctcactagggagtgccagacagtgggcacaggacagtgggtgcagtgcaccgtgcgcaagccgaagcagggcgaggcattgcctcactcgagaagtgcaaggggtcagggagttccctttcctagtcaaagaaaggggtgacagatggcacctggaaaatcgggtcactctcaccctaatactgcgcttttccgacaggcttaaaaaacggcgcaccaggagattatatcccgcacctggctcagagggtcctacgcccacggagtcttgctgattgctagcacagcagtctgagatcaaactgcaaggcggcagccaggctgggggaggggcgcctgccattgcccaggcttgcttaggtaaacaaagcagccaggaggctcgaactgggtggagcccaccacagctcaaggaggcctgcctgcctctgtaggctccacctctgggggcagggcacagacaaacaaaaagacagcagtaacctctgcagtgttaaatatccctgtctgacagctttgaagagagcagtggttctcccagcacacctctggagatctgagaatgggcagactgcctcctcaagtgggtccctgacccctgacccccgagcagcctacctgggaggcaccccccagtaggggcagattgacagcccacacggccgggtactcctctgagacaaaacttccagagaaatgatcagacagcagcattcgtggttcacgaaaatctgctgttctgcagccaccactgctgatacccaggcaaacagggtctggagtggaccgctagcaaactccaacagacctgcagctgagggtcctgtctgttagaaggaaaactaacaaacagaaagacatccgcaccaaaaacccatctgtacatcaccatcatcagagaccaaaagtagataaaaccacaaagatggggaaaaaacagagcagaaaaactggaaactctaaaaagcagagcgcctctcctcctccaaaggaacgcagttcctcaccagcaacggaacaaagctggatggagaatgactttgacgagttgagagaaggcttcagatgatcaaactactctgagctacaggaggaaattcaaaccaaaggcaaagaagttaaaaactttgaaaaaaatttagatgaatgtataactagaataaccaatacagagaagtgcttaaaggagctgatggagctgaaagccaaggctcgagaactatgtgaagaatgcagaagcctcaggagccgatgcgatcagctggaagaaagggtatcagtgatggaagatgaaatgaatgaaatgaagtgagaagggaagtttagagaaaaaagaataaaaagaaacaagcaaagcctccaggaaatatgggactatgtgaaaagaccaaatctacgtctgattggtgtacctgaaagtgacggggagaatggaaccaagttggaaaacactctgcaggatattatccaggagaacttccccaatctagcaaggcaggccaacattcagattcaggaaatacagagaacgccacaaagatactcctcgagaagagcaactccaagacacataattgtcagattcaccaaagttgaaatgaaggaaaaaatgttaagggcagccagagagaaaggtcgggttacccacaaagggaagcccatcagactaacagcggatctctcggcagaaactctacaagccagaagagagtgggggccaatattcaacattcttaaagaaaagaattttcaacccagaatttcatatccagccaaactaagcttcataagtgaagaagaaataaaatactttacagacaagcaaatgctgagagattttgtcaccaccaggcctgccctaaaagagctcctgaaggaagcactaaacatggaaaggaacaacctgtaccagccactgcaaaatcatgccaaattgtaaagaccatcgaggctaggaagaaactgcatcaactaacaagcaaaataaccagctaacatcataatgacaggatcaaattcacacataacaatattaactttaaatgtaaatggactaaatgctccaattaaaagacacagactggcaaattggataaagagtcaagactcatcagtgtgctgtattcaggaaacccatctcatgtgcagagacacacataggctcaaaataaaaggatggaggaagatctaccaaacaaatggaaaacaaaaaaaggcaggggttgcaatcctagtctctgataaaacagactttaaaccaacaaagatcaaaagagacaaagaaggccattacataatggtaaagggatcagttcaacaagaagagctaactgtcctaaatatatatgcacccaatacaggagcacccagattcataaagcaagtcctgagtgacctacaaagagacttagactcccacacaataataatgggagactttaacaccccactgtcaacattagacagaacaacgagacagaaagttaacaaggatacccagaaattgaactcagctctgcaccaagcggacctaatagacatctacagaactctccaccccaaatcaacagaatatacatttttttcagcaccacaccacacctattccaaaattgaccacatacttggaagtaaagctctcctcagcaaacgtaaaagaacagaaattataacaaactgtctctcagaccacagtgcaatcaaactagaactcaggattaagaaactcactcaaaaccactcagctgcatggaaactgaacaacctgctcctgaatgactactgggtacataacgaaatgaaggcagaaataaagatgttctttgaaaccaacaagaacaaagacacaacataccagaatctctgggacacattcaaagcagtgtgtagagggaaatttatagcactaaatgcccacaagagaaagcaggaaagatccaaaattgacaccctaacatcacaattaaaagaactagaaaagcaagagcaaacacattcaaaagctagcagaaggcaagaaataactaaaatcagagaagaactgaaggaaatacagacacaaaaaaacccttcaaaaaattaatgaattcaggagctggttttttgaaaggatcaacaaaattgatagaccactagcaagactaataaagaagaaaagagagaagaatcaaatagacgcaataaaaaatgataaaggggatatcaccaccgagcccacagaaatacaaactaccatcagagaatactgcaaacacctctacgcaaataaactagaaaatctagaagaaatggataaattcctcgacacatacaccctcccaagactaaaccaggaagaagttgaatctctgaatagaccaataacaggctctgaaattgtggcaataaccaatagcttaccaaccaaaaagagtccaggaccagatggattcacagccgaattctaccagaggtacaaggaggaactggtaccattccttctgaaactattccaatcaatagaaaaagagggaatcctccctaactcattttataaggccagcagcatcctgataccaaagccgggcagagacagaaacaaaaaagagaattttagaccaatatccttgatgagcattgatgcaaaaaccctcaataaaatactggcaaaccaaatccagcagcacatccaaaagcttatccaccatgatcaagtgggcctcatccctgagatgcaaggctggttcaatatatgcaaatcaataaatgtaatccaacatataaacagaaccaaagacaaaaaccacatgattatctcaatagatgcagaaaaggcctttgacaaaattcaacaatgcttcatgctaaaaactctcaataaattaggtattgatgggacatatctcaaaataataagagctatctatgacaaacccacagccaatatcatactgaatgggcaaaaactagaagcattccccttgaaaactggcacaagacagggatgccctctctcaccactcctattcaacgtagtgttggaagttctggccagggcaattaggcaggagaaggaaataaagggtactcagttaggaaaagaggaagtcaaattgtccctgtttgcagatgacatgattgtatatctagaaaaccccattttctcagcacaaaatctcctaaagctgataagcaacttcagcaaagtctcaggatacaaaatcaatgtacaaaaatcacaagcattcttatacaccaagaagagacagagagccaaatcatgagtgaactcccattcacaattgcttcaaagagaataaaatacttaggaatccaacttacaagggacatgaaggacctcttcaaggagaactacaaaccactgctcaatgaaataaaagaggttacaaacaaatggaagaacattccatgctcatggataggaggaatcaatatcacgaaaatggccatactgcccaaggtaatttatagattcaatgccatccccatcaagctaccaatgactttcttcacagaattggaaaatactactttaaagttcatatggaaccaaaaaagagcccgcatcgccaagtcaatcctaagccaaaagaacaaagctggaggcatcatgctacctgacttcaaactatactacaaggctacagtaatcaaaacagcatggtactggtaccaaaacagagatatagatcaatggaacagaacagagccctcagaaataatgctgcatatctacaactatctgatctttgacaaacctgagaaaaacaagaaatggggaaaggattccctatttaataaatggtgctgggaaaactggctagccatgtgtagaaagctgaaactggatcccttccttacaccttatacaaaaatcaattcaagatggattaaagacttaaatgttagacctaaaaccataaaaaccctagaggaaaacctaggcattaccattcaggacagaggcatgggcaaggacttcatgtctaaaacaccaaaagcaatggcaacagaagccaaaattgacaaatgggatctaattaaactaaagagcttctgcacagcaaacgaaactaccatcagagcgaacaggtaacctacaaaatgggagaaaatttttgcaatctactcatctgacaaagggctaatatccagaatctacaatgaactcaaacaaatttacaagaaaaaaacaaccccatcaaaaagtgggtgaaggacatgaacagacacttctcaaaagaagacatttatgcagccaaaagacacatgaaaaaatgctcaccatcactggccatcagagaaatgcaaatcaaaaccacaatgagataccatctcacaccagttagaatggcaatcattaaaaagtcaggaaacaacaggtgctggagaggatgtggagaaataggaacacttttacactgttggtgggactgtaaactagttcaaccattgtggaagtcagtgtggtgattcctcaaggatctagaactagaaataccatttgacccagccatcccattactaggtatatacccaaaggactataaatcatgctgctataaagacacatgcagacatatgtttattgcggcactattcacaatagcaaagacttggaaccaacccaaatgtctacaatgatagactagattaagaaaatgtggcacatatacaccatggaatactatgcagccataaaaaaggatgatttcatgtcctttgtagggacatggatgaaattggaaatcatcattctctgtaaactatcgcaaggacaaaaaaccaaacaccacatgttctcactcataggtgggaattgaacaatgagaacacatggacacaggaaggggaacatcacactctggggactgttgtggggtggggggagaggggagggatagcattaggagatatacctgatgctaaatgacgagttaatgagtgcagcacaccagcatggcacatgtatacatatgtaactaacctgcacattgtgcacatgtaccctaaaacttaaagtataaaaaaaaaaatctggcaaattttttgccagaactgcaatttactcgaacattttccttgccttagtacagttgcttttagtttttcaattataattaagtcttcttagataaaggatttaaaaaaaaaaaaaaccctttcctattctacatgagaatttgacctttggttaactttctagctctgttttccttgagatctcataaaagtggactatcaacggttttactaggcaacattgcttatgtaaaaatggcctttgcttgggaaactgcatctgaactgagaaaaccataactacctggtgagaagtcttcctcagggcctccttgagtgcagtgactcctcctggtcctgcctcctacctactaagttgttacaggagatacttttgtagggcatatgaggttttgaagccagggtcattcttttgtctgtatgatgtggatctcaactctttttttttttttttcttttttttgagacagagtcttgctctgtcacccaggctggagtgcagtggtgcaatcttggctcactgcaacccccggctcccaggttcaagtgattctcctacctcagcctctcgagtagttgggattacaggcacctgccaccacacccagctaatttttgtatttttagtagagacggggtttcaccaggttggtcaggctggtctcaaactcctggcctcaggtgatccacccgccttggcctcccaaagtgctgggattgcaggcatgagctaccatgcccggccagatctcaactgtttgtgcctgggctgtaacctggttgggaggcaaagagaccctctcctggacagctgtgtgaactgctgtatggactgctacatggtcttccattgagaggagcacctcctgccactgtgtttctccaggctgtcttcccttggctcatggtggtcttataagtctgaatgtttagtggtatcaaagaagacccttggtggacttggcatcctacatttaggattatttccttaggagagcttcaccaaagtagaataactgggtcccatactatgggctccttaatacagatataaagtcaagtctatttcccaaagagttgtatcaccagctttcaccagctgtgcaatgaggcagccatttctaggtactctcaccagaatttttttgaaattttgtagatttgatcataaaaattggtttcttgtcataatttacagttttaaaaaatcttaaactgtaggtttgagaactgctagcatttcctcttttgtgaattgatgctttctttcgcccagaaaaaaagttaaattgcaagtaaacgggatttaaaaattttaaattgcaaagtgcaaccagatgtaagaggcattttccccctctgttctaaactgctttttctgcccttctaggtctacgaggcccttctcccccagtatgccaaactcgagcagagaatcttgtctcagacccgggggcctccggagtgaacaggcatccctgttgcccctgcctgcccagatttactgaccccatttgtcgacatggccccagacaggagggatccacttctctgttctgaacagctcttcctgcccctactgactccttggagtgtccaggaccatcttaaagccgccctcagcacatctgcatgaagatagataggcactcctgtccctgtgcccgtgtgccccagggcaggaaagcatctctcttttcctgtcttttatcccaggaggcaggacaacactgagactgggatatgtccaataaaaactatgacttttccccttgcagaggcagaattaaagctaatctagggactcaaatcagcagaatgggggagacaaagcccggtctcaccccctaacctcatcctatctctttctccaaccctgactgcccactcctccacaaaccgtgacccatagccgcccccaccccataccttgatctaccatccatcctcttccccaatccaaaccccacagtctcttctctcccacaccctgccctccttgtttcagctgtctgaggtgcctcgcagggcctctcttacttgccccatgctcaccctttccatgctgtccccattctctcctttcaccatctctcctctccccctccttcatctctcctccctccccaaactcacttggcataattcacaacctcccacccaaacaatgggcctggtggacgtgcttcctgtgccctccctttagctatgcccacagatcactgagagggaccatctcccaagtggtgcagtttagaacttctctccctttttctccctcattccctctctcttcttgcagtccacttgctgaagaagttgtgtcatttctctggaagaatttccaaaattctggatttcttttttattttggagtatttcatcagctgaaaagtgattctcactttgagttttcttcctatatttgtatagtgagttcctttttccttcctctttatccctcctgttttactttatacctctctattccttgctcaaattattgcaaaagcctctatagaaagtcctctgtgatctgactcctgcagactcttccagatttttctgcccaaggcctttactgagctcaggactccagctaaatcaaaatacgcatgttctcacccagagtgacaaaatcctgcagataggtttaagacctagtggctcagagcagtagctactgggaagttaaaaggaaggggcttagaaaatgaatgggaccaaaggcatcacttctgatggagatgaagccatcttgaaagtgagtggtgtcctttggaggcatggtggatgaaaggcgcaaaggaagcaagaggttaaagataatggcccattagatacaacagcaagcccaagattccgaagaagacagacaactccccctagtaccacctagacattactttttaaagacattttacattattgtccagcagaaaaaggctgtcttggaccatgaaacagtaaactgtaactaaacacttcaacatgaatttgaaaataaataattgtggatataaaagaacaccagagatcagaaattcaaaaactcagaataaaaatgaaaaagctacaagcatatatgagaagagaactgactgaacttgggaaataatttgaacaaaaagataaatcttcacagatatgaatactaaattatatcttaatgaaaatagatatggtcacaagtacattaaggcacgtagaaggtaggagtaagaaaagctaagagaagcaaaacaaacaaagcaatattaaaggaagagccaaaaagacccagaaataaaatgacagataaagaagattgtcaaagaaaagatgatacaggtaagattggaactcatgaagacaaaagataagacagtggcatagagttaatatttaaaattcaaatattaaaactcaaataaaccccaaagaacttttggaaaacaaaagaaaaccttaaactttatcttgaaagggtctatcttgttacttagaatattgaaccagaatgattagctctgagacatagcctaccaactatactttgaagccaaagaaaaagaactatgtaagcctctaggccaaaagacctagtctcttacaaaggaaagacctggttggcctcaaacttctcaacaaagcaagatagcaatggggcaaccttttcaagaaactcaaagtatgaactgaggatttcatatttcaccaagctgtcctttaagtatcaaggatataggaagaagttttaattacacaagagcccagggactattatactcacaacttcttccttagaattctactaaaagacaagcttcatccaactagatgattggggaaacttgagcaaaaggactggacatgaccattgaatatctttgtagatctgaggccaaatggaagtggggataagggtggaagaaccgtattagtcccttctcacactggtataaagatagtacccagctgggaatggtggctcatgtctgtaatcccagcactttgggaggctgaggcaggaagatcacctgaggtcaggagctcgagaccagactggccaacatggtgaaaccccgtctttactaaaaatacaaaaattagctgggtatggtggtgcacgcctgtaatcccagctacttgggaggctgaggcacgagaattgcttgaacccgggggcagagattgcagtgagccgagattgtgccacttcactccagcctgggcaacagtgagactctgtctcaaaaaaataataaagatagtacccaagactgggtaatttataaagaaaagaggtttaattgactcacagttccacatggctggggaggcctcaggaaacctacaatcgtggcaggaggtgaaggggaagaaaggaccttcttcacatggtggcaagaaagagagagcatggacgcacaagagagcaagcagggaaaactgtcttataaaaccatcagatctcgtgagaactctctatcatgagaacagcttgggggaaaccacccccatgatccagtcacctctcaccaggtctcgccctcaacacctggggattacaattcaagatgagatttgggtggggacagaaagcctaatcacatgaaatagtatcaaactatatatgctttgacaagacagaagtaacaaaacaaaaaagaagggagagaggaagaggaaaatacaaagaactccttgttgcttaggcaatatgtagaagtcaaatagtattatttaaagttgacaaaccaagtatatgaagtgtaagtaaggaaaaagggagatttagagcattaaaggtgtactatactattaatagtatagaatacatagtataattactagaataaaaatgtaaatcatcaatgctcaaagaagcaataataaagattacagtgaaaaacatgcagtaaatgtaccatcatacagtaaatatattaagtccaagcatataagttaaatcagtacatgtgaaaggacttacctattaaaaggaatatcagattggcttacaaaccaatgtcttattgtctgttatttataagagacacatctaaagtaagtgattcaggagaggctaaaaaaaaagagatgggcaaaaatagaccagacaagtaggaccacaaaaggcaaagattacagtatccatatctgaaaaggtagaattcaggaaaaaatagacaagacaatgaaggatacattaaaatgctaaaagccacaattcacaaggaggatatactatttatgagtgttagagcttcagttatctggtttgtcaactttaagtgatattctttggctcctgcctatcccctgtacaacaaagagctctttctactttcctctttctctctccctcctttttcattgtttccgttgtgttacttctgccttgtcaaagcacataacatttgcataacaaattatgcaaggaaaaatgaatagaaacctagaaataacagagaaatttaaaacacctctctctcatccaagactgaagttaaggagacaaaaaatacatataacgatataagtgatctgagtaacagtatctataaagtagatctaatgaatatatgttgaactttctaccttgataatagagaatattactctagggcaagcgtgatggcccacacctgtaatcccagcactttgggaggctgaggcaggtggatcgcttgagctcagaagttcgagaccagcttgggcaacatggtgaaaccccatctctacaaaaattagccaggcatggtggcaggagcctgtagtccctagaaatttatgactcttctaggaatcaagattgttgtcccacagcagcctcacacacctggcatagcagtgattaaactcattgggagctatctcaaaaataattgtgagtgaggcttttggtacatagagtagactccaatcagacacataaaacccacagtacattttaggaagctatactaatggcattaacctggattaaaagggactaaatgttaaaagaccctggacccccaactttctatgggcaacaagcaggcatagttgctcaaaagacagtttctagcccaggcatagtagctcatgcctgtaatcgcagcactttgagaggccaaggcgggcggatcatgaagtcaggagttcaagaccagcctggtcaaaatggtgaaaccccatctctactaaaaatacaaaaattagctgggcatggtggtgcatgcctgtagtcccagctacttgggaggctgaggcaggagaatcgcttgaacccgggaggttgaggttgcagcgagctgagatctcgccactgcactccagcttgggtaacagagtgagacttcatctcaaaaaaaaaaaaaaaaaagtatatatatcaggccgggcgtggtgtctcatgtctgtaatcctagaactttaggaaaccgaggtgggtggatcacctgaggtcaggagttcaagatcagcctggccaacatggtgaaaccccgtctctactaataatacaaaaaaaattaggcaggcgtggtagcagacgcctgtaatcccagctactcaggaggctgagacaggagaatcacttgaacctgggaagtggaagttgcagtaagctgagatggcagcactgtactccagcctgggtgacagagcaagactctgtctcaaaaaaaaaaaaaaaaaaagatatatatatatgtatgtatgtatctatgtatcagaaaaaaacgcaagtacactttaagcatattttaaaatgcttactgacaaaaatcaaagagtttgataaaattctgtgttaccatggctgtggagaaataggcattcgtatacatttctggtaggagtgcaattttgtgaaactcctaaagggggaaattgggcaacatcaacaaaactaaatatgagtatgacttaaccattccaataggaatctgcacaaagacacaattccaacatacaagacaacatatgtataaggttattgtgaaattattgataacagcgaagtacttgggaaaaggcacatatacattaatatacgacagattgaatagattataatgcatccacacaataaaaaagaatgaggaagatctctatgtaccaatgatgggtaaattccataaacaaaggacagttctctacttagttctttttattccacttaacaaagttttatagtttttagtgtatgtcttacacatattttgttaaattatttgatatttcaaaaatgttttgtgataaaatgtgtgacatttatcactttaaccatgttttgtaataaaatgtatgacatttatcattttaaccatggaaaagtgttcattttttcaattgtttttgctagcatttaggaatattccatggtatgttgaattattcattgtgaacatattaagatcaaattcagtagcattaggtatattaccaatattatgctaccatcaccaccacacatttccaaaacctttttatcattctagactgaaactctactcactaaacaataactcctatttttctctccccagcccttgataaccgctatcctttctgtctctatggatttgcctattctaggtttttcatataagtggtatcatacatgtttcctcttgtttctggcttattccacttcgtgtgatattttattaaattttgcatgtgtaaaatagttaatattttaatgttttaaatttaaaggttcattcacattgtagcaaggctgaataatattccgctgtgtttatataccacatcctgtttatccattcatccatcagtggacatttaagttgttttcaccttttggtgattgtaaataatgctgctatgaacattgatgtacaaatatctgagtccgtgctttcaattttttgggtatatacctagaagtggaattgctgaatcatatagtaattctgtttaactttttgaggacccaccacagttttccacagtagctgcaccattttacattccccagcagtaatgcacagggatctagtttctctacatccttgtcaacacttgttatttttctttatatatatatatatatatatatataatagccatcgttatggatgtgaagtgaaatttcattgtggtttttatttgtgttttcctaatgactagtgatgttaagcacttttcatgttcttatttgccgtttgtacacatttaattgttttgatgctgttggaaaagtgtttcattttttcaattgtttttgctagcatgtagagatagtttatggtatatggaattatttgttgctaacatataaaaatcattttttttttagatggagtcttgctctgtcgccaggctggaatgcagtggcaccatctcggctcactgcaatctctgcctcctgggttcaagcaattctcctgccttagcctcccgagtaactgggattacaggcacccccaaccatgcccagctaatttttgtatttttagtagagacgggatttcaccatgttggccaggatggtctcaatcccccaaccttgtgatccacccgcctcagcctcccaaagtgctggaattaacaggcgtgagccaccacgcccagccataagaatcaatttttgtttgattttgtgtcttgcaactttattaaattcacttactagttatggtagtattttgtattagtaggatatgtagggtttctatccatcatgtcatgtcatctataaaaacaaagacagttttcttctcttcaatctgtaagcattttatttcattttcttgcctttctgcaatggctagaatgtctagtatagtgttgaatagaagcagggagagcaataatccttgccttgttcctgatcttagcggacagcattttatcactaagagtgtgtgtgtgaatacgccctccatcgggctaagaaatttccctttcatttcttgctggaggtggggaggaatatttaaaaagaatgtgtaggtttgtcttgaattttgttaaatgttttgcatgtatgtgttatggttttggtattatgtgttccttaaatatttgattgaattcaccagtgaaaccatcttagttagatgttttctttgtggaacttttaagtgaaaactcaatttacataaaaatatatggcccttcagattttgtacttctttttgtgtcagtgttaataatacgtatctttcaaagaatatccccctttttttttggtagagatagggttttgccatgttgttggtagcaagccctaaccctgtcataaacaggccttaaataaactggccataaacaggatttctgcagcaatgggacatgctcatgatggctgtcatgcacactgctaaaagttgttggtttactagagcagggcaaggaacacctggccccgcccggagcaaaaaactgctcaaaccacaaacgatagcaggaaaggcctgtgccttggcagcatgtttttgctgcagataatcagccagagcctgtttctctgctcctcgctgagattgctttgtttcccataaagattgcttttagctaatctacaatctatagaagcaatgcttatcactggctttctgtcaataaatgtgtgggtcaagctctgtttgtggctctcagctctgaacgctgtcacccctgatccccactttatactgtattcctgtgtctgtcttaattactgtagcgccgctgggttggagtctccacgaccgagctggtctcggcaagtggtgcccaacacgggggctcgaacctgggtcgaatagtcgccagagcgatggttagaaaatgtggaactacactggaggacacccgagtactgttaaagcaatcctcatggtgagtaagaaggggagctcagaagcatcagggtaacaatgggacaagggtcgagcaggcatgaggcttatttgagtctgcttcgccatctcagaaaaggaggagtgaacgttagcactagctgacttacgcagctttttagtgcagtagagaaatattgccgctggtttccggaccgaggaactgtgaatgtagaggtctgggaaaaggtaggcagcacactgaaaaaggcatataaggatggtgttggggatattcctataactggtcagtgtgggctctggttcattccaccttggagcctttccacacagatgacgaggaggaggaatcagaggaagaaggagagtctaacgaagtaacagaagaggtgacagagcaagtttgcttgccagctaaagcagcagagtagggagaggtttgtccctacccctctacaccccctcattattttgaagaaaaggagtggcctgaccctccgaatctttcttttccagaggacactgggcgaaaagtagttgccccagtgactgagcagtgcctcgagcaaccgctgtcagttctattcaggcaggaatccagcaagctagacaagagggtgatatggatgcttggcagtttcctgttagaatacacccacctgatcaacagggaaatattatggctacatttgagtcttttccttttaaaatacttaaagaatttaaacaatttattaatcaacatggaccaggttttccttttgtaatgggactgttaaagaatgttgctgtctccagtcagatgatgccagcggtatggcaggatcacttctaggtaggtctaatttacatttaaaaggagtacaagtacaaacaggagtcattgattcagattacagtggggaaattcaaattgttatatctacttctgttccctggaaagcagagccaggagagtgtatagcacaactcctgattgtgccatatgtggaaatggggagaagtgaaactaaacagacaggaggatctggaagtacaaataagcaagggagagcagcttactgggtaaatcaaattactgataaacatcctacctgtgaaataactattcagggaaagaaattcaaagggttgggagatacaggagcggacgtttcaatcatttctctacagcactggccgtctgtgtggccaattcaatccgctcaatttaacatagttggagttggtaaagcccctgaagtatatcaaagtatttatattttgcattgtgaaggaccccatgaacaatctgggactattcagccaattgtaacttctgtacctataaatttatgggggagagatttattacagcaatggggagcacaagttccccattacatagaacaattatatagccctcaaagtcagcatgtgatacaagagatggggtatgtgcctggcatgggattagaaaaaaatttacaagggttaaaaaaaccagttcaagcggaaggaaaaaattcttgtcagggtttagggtatcatttttgatggcggccattgttaagcctccggaacctatacctttaaaatggttaacaagtaagccaatttggatagaacaatggttgctgagtaaagaagaactggaggctttagaggtcttagttactgaacaattagaaaaaggacatatagctctaacgtttcccccctggaattctccactctttgttattattattattatttttcttaagatggagtctcgctctgctgcccaggctggagtgcagtggtgcgatcttggctcactgcaagctccgcctcctgggttcatgccattctcctgcctcagcctcccgagtagctgggactataggcgcccaccaccacgcccggctaattttttgtatttttagtggagacggggtttcactgcattagccaggatggtctcgatctcctgaccttgtgatccacccaccttggcctcccaaagtgctgggattacaggtgtgagccaccatgcccagccctccagtctttgttaagaaaaaatgtgataaatggagaatgttgacagatcttagagccattaattcggttagacaacctatgggagcattgcagcctggactgccttctgctgctatgattccaaaaaattggcctttaatagtcatagatttaaaagactgtttctttattatccccttagctgagcaagactgtgaatggtttgcatttacaattcctgtggtaaacaacctgcagcctgcttagcgttttcattggaaagtgttgccacaaggcatgttaaacagtccaatgatttgtcagacttatgtaggacaagcaattgaacctactcgtaaaaaattttcacagtgttacattattcattatatggatgatatactttgtgctgcccccactcaggaaatattactccaatgttataatcacttgcaaaactcgatttctcatgctgatttaattatagctcctgacaaaattcagactactactccttactcctacttggggaccttagtaaatgacactaccattgtgccacagaaagtaaccatacatagggatcaattgaaaacattgaatgactttcaaaaattactggaaaacattaattggatatgacctgctctaggcattcctacctctgccatgagtaatctcttttctatccttagaggagatcccagtctcacaaacccttggcaattaacaaaggaggctgaggcagagttacagctgattgaaaagcaagtgcataaagctcaaataaatagaatagatccagaaaagatccagaaaagattgatttttccaactcagcattcacctactggtgttgttgttcaagagcaagatcttgtagaatggctttttcttccacatactaatccatggactctaactccttatttggatcaaattgctactctgataggaaatgggagaactcaaattgttaaattacaaggatatgatcctggaaaaatttttgttccccttacaaaggcacaaatacaaaaagcctttataaatagtcttaattgcaaacccatttagctgatttcataggtgttcttgataatcactttccaaagacaaaattatttcaatttttgaaattaactaattggattctccctagaataactaaatttaaacgaattgaaggtgcggaaaatgtttttacagatgggtctagtaatggtgaagcttctaactctggatcaaaaagtaaagttttccagacgccctatacttcagctcaaaaagcagagcttgtagttgtaattgaggtgctgacggttttgagatgcctgtcaatgtaatttctgattcttcatacgtggttcattccacacaattaattgaaaatgttcagttacaatttcatgcagataaacaactgatgactttatttacccaattgcaaacagcagttaagagtagaatgcaccctttttacataactcgtattagaggtcatacacctcttccaggacctttgactgcaggaaatcaaattgctgattgcctagttgctatggcattatctaatgctagacactttgataatttaacccatgttaatgcctctggtctcaaa

(The sequence listing continues in the following parts.)

What is claimed is:

1. A method for determining whether a human's risk for venous thrombosis (VT) is reduced by treatment with an HMG-CoA reductase inhibitor, the method comprising testing nucleic acid from said human for the presence or absence of an allele at a polymorphism represented by position 101 of any one of the nucleotide sequences of SEQ ID NOS:713, 711, 501-710, 712, and 714-3098 or its complement, wherein the presence of said allele indicates said human's risk for VT is reduced by treatment with said HMG-CoA reductase inhibitor.

2. The method of claim 1, further comprising correlating the presence of said allele with a reduction of said risk for VT by an HMG-CoA reductase inhibitor.

3. The method of claim 2, wherein said correlating is performed by computer software.

4. The method of claim 1, wherein said HMG-CoA reductase inhibitor is a hydrophilic statin.

5. The method of claim 1, wherein said HMG-CoA reductase inhibitor is a hydrophobic statin.

6. The method of claim 1, wherein said HMG-CoA reductase inhibitor is selected from the group consisting of atorvastatin (Lipitor®), rosuvastatin (Crestor®), pravastatin (Pravachol®), simvastatin (Zocor®), fluvastatin (Lescol®), and lovastatin (Mevacor®), or any combination thereof.

7. The method of claim 1, wherein said HMG-CoA reductase inhibitor comprises an HMG-CoA reductase inhibitor in combination with at least one additional therapeutic agent.

8. The method of claim 7, wherein said HMG-CoA reductase inhibitor is selected from the group consisting of:
simvastatin in combination with ezetimibe (Vytorin®);
lovastatin in combination with niacin (Advicor®);
atorvastatin in combination with amlodipine besylate (Caduet®); and
simvastatin in combination with niacin (Simcor®).

9. The method of claim 1, wherein said nucleic acid is a nucleic acid extract from a biological sample from said human.

10. The method of claim 9, wherein said biological sample is blood, saliva, or buccal cells.

11. The method of claim 9, further comprising preparing said nucleic acid extract from said biological sample prior to said testing.

12. The method of claim 11, further comprising obtaining said biological sample from said human prior to said preparing.

13. The method of claim 1, wherein said testing comprises nucleic acid amplification.

14. The method of claim 13, wherein said nucleic acid amplification is carried out by polymerase chain reaction.

15. The method of claim 1, wherein said testing is performed using sequencing, 5′ nuclease digestion, molecular beacon assay, oligonucleotide ligation assay, size analysis, single-stranded conformation polymorphism analysis, or denaturing gradient gel electrophoresis (DGGE).

16. The method of claim 1, wherein said testing is performed using an allele-specific method.

17. The method of claim 16, wherein said allele-specific method is allele-specific probe hybridization, allele-specific primer extension, or allele-specific amplification.

18. The method of claim 1 which is an automated method.

19. The method of claim 1, wherein said human is homozygous for said allele.

20. The method of claim 1, wherein said human is heterozygous for said allele.

21. The method of claim 1, wherein said VT is deep vein thrombosis (DVT).

22. The method of claim 1, wherein said VT is pulmonary embolism (PE).

23. The method of claim 1, wherein said human did not have VT prior to said testing.

24. The method of claim 1, wherein said human had VT prior to said testing and said risk is for recurrent VT.

25. A method for determining whether a human's risk for venous thrombosis (VT) is reduced by treatment with an HMG-CoA reductase inhibitor, comprising:
a) testing nucleic acid from said human for the presence or absence of an allele at a polymorphism represented by position 101 of any one of the nucleotide sequences of SEQ ID NOS:713, 711, 501-710, 712, and 714-3098 or its complement, wherein the presence of said allele indicates said human has an increased risk for VT; and
b) correlating the presence of said allele with a reduction of said increased risk for VT by an HMG-CoA reductase inhibitor.

26. A method for determining whether a human has an increased risk for venous thrombosis (VT), comprising testing nucleic acid from said human for the presence or absence of an allele at a polymorphism represented by position 101 of any one of the nucleotide sequences of SEQ ID NOS:713, 711, 501-710, 712, and 714-3098 or its complement, wherein the presence of said allele indicates said human has an increased risk for VT.

27. The method of claim 26, wherein said human had VT prior to said testing and said risk is for recurrent VT.

28. The method of claim 26, wherein said polymorphism comprises the following polymorphisms: F5 polymorphism rs6025, FGG polymorphism rs2066865, ABO polymorphism rs8176719, and at least one F11 polymorphism selected from the group consisting of rs2036914 and rs2289252.

29. The method of claim 1, further comprising administering an HMG-CoA reductase inhibitor to said human who has said allele.

30. The method of claim 1, further comprising administering a therapeutic agent that is not an HMG-CoA reductase inhibitor to said human who does not have said allele.

31. The method of claim 30, said therapeutic agent that is not an HMG-CoA reductase inhibitor is selected from the group consisting of anticoagulants such as warfarin, direct thrombin inhibitors such as dabigatran, and direct factor Xa inhibitors such as rivaroxaban or apixaban.

32. The method of claim 26, further comprising administering a therapeutic agent for treating VT to said human who has said allele.

33. The method of claim 32, wherein said therapeutic agent is selected from the group consisting of HMG-CoA reductase inhibitors, anticoagulants such as warfarin, direct thrombin inhibitors such as dabigatran, and direct factor Xa inhibitors such as rivaroxaban or apixaban.

34. A method for reducing risk of venous thrombosis (VT) in a human, comprising administering to said human an effective amount of an HMG-CoA reductase inhibitor, wherein said human has been identified as having an allele at a polymorphism represented by position 101 of any one of the nucleotide sequences of SEQ ID NOS:713, 711, 501-710, 712, and 714-3098 or its complement, wherein the presence of said allele indicates said human's risk for VT is reduced by treatment with said HMG-CoA reductase inhibitor.

35. The method of claim 34, wherein said method comprises testing nucleic acid from said human for the presence or absence of said allele.

36. A method for determining whether a human's risk for venous thrombosis (VT) is increased or whether said risk is reduced by treatment with an HMG-CoA reductase inhibitor, the method comprising testing nucleic acid from said human for the presence or absence of an allele at an LD polymorphism that is in linkage disequilibrium with a first polymorphism represented by position 101 of any one of the nucleotide sequences of SEQ ID NOS:713, 711, 501-710, 712, and 714-3098 or its complement, wherein the presence of said allele indicates said human's risk for VT is increased or said risk is reduced by treatment with said HMG-CoA reductase inhibitor.

37. The method of claim 36, wherein said LD polymorphism is selected from the group consisting of the polymorphisms in Table 3.

38. A detection reagent for carrying out the method of claim 1, wherein said detection reagent is an allele-specific probe or an allele-specific primer.

39. A test kit comprising one or more containers containing the detection reagent of claim 38 and one or more components selected from the group consisting of an enzyme, polymerase enzyme, ligase enzyme, buffer, amplification primer pair, dNTPs, ddNTPs, positive control nucleic acid, negative control, nucleic acid extraction reagent, and instructions for using said test kit which instruct that the presence of said allele indicates that said risk for VT is reduced by treatment with said HMG-CoA reductase inhibitor.

40. The method of claim 26, further comprising enrolling said human in a clinical trial of a therapeutic agent.

41. The method of claim 30, wherein said therapeutic agent is being evaluated in a clinical trial.

42. The method of claim 1, wherein said polymorphism comprises a polymorphism in the F11 gene selected from the group consisting of rs2036914 and rs2289252.
